United States Patent Application Publication US 2019/0144922 A1 - sequence listing, part 3

SEQ ID NO: 2 - DNA, 4686137 bp, Escherichia coli (residues 1-1,562,046 of 4,686,137)
agcttttcattctgactgcaacgggcaatatgtctctgtgtggattaaaaaaagagtgtctgatagcagcttctgaactggttacctgccgtgagtaaattaaaattttattgacttaggtcactaaatactttaaccaatataggcatagcgcacagacagataaaaattacagagtacacaacatccatgaaacgcattagcaccaccattaccaccaccatcaccattaccacaggtaacggtgcgggctgacgcgtacaggaaacacagaaaaaagcccgcacctgacagtgcgggctttttttttcgaccaaaggtaacgaggtaacaaccatgcgagtgttgaagttcggcggtacatcagtggcaaatgcagaacgttttctgcgtgttgccgatattctggaaagcaatgccaggcaggggcaggtggccaccgtcctctctgcccccgccaaaatcaccaaccacctggtggcgatgattgaaaaaaccattagcggccaggatgctttacccaatatcagcgatgccgaacgtatttttgccgaacttttgacgggactcgccgccgcccagccggggttcccgctggcgcaattgaaaactttcgtcgatcaggaatttgcccaaataaaacatgtcctgcatggcattagtttgttggggcagtgcccggatagcatcaacgctgcgctgatttgccgtggcgagaaaatgtcgatcgccattatggccggcgtattagaagcgcgcggtcacaacgttactgttatcgatccggtcgaaaaactgctggcagtggggcattacctcgaatctaccgtcgatattgctgagtccacccgccgtattgcggcaagccgcattccggctgatcacatggtgctgatggcaggtttcaccgccggtaatgaaaaaggcgaactggtggtgcttggacgcaacggttccgactactctgctgcggtgctggctgcctgtttacgcgccgattgttgcgagatttggacggacgttgacggggtctatacctgcgacccgcgtcaggtgcccgatgcgaggttgttgaagtcgatgtcctaccaggaagcgatggagctttcctacttcggcgctaaagttcttcacccccgcaccattacccccatcgcccagttccagatcccttgcctgattaaaaataccggaaatcctcaagcaccaggtacgctcattggtgccagccgtgatgaagacgaattaccggtcaagggcatttccaatctgaataacatggcaatgttcagcgtttctggtccggggatgaaagggatggtcggcatggcggcgcgcgtctttgcagcgatgtcacgcgcccgtatttccgtggtgctgattacgcaatcatcttccgaatacagcatcagtttctgcgttccacaaagcgactgtgtgcgagctgaacgggcaatgcaggaagagttctacctggaactgaaagaaggcttactggagccgctggcagtgacggaacggctggccattatctcggtggtaggtgatggtatgcgcaccttgcgtgggatctcggcgaaattctttgccgcactggcccgcgccaatatcaacattgtcgccattgctcagggatcttctgaacgctcaatctctgtcgtggtaaataacgatgatgcgaccactggcgtgcgcgttactcatcagatgctgttcaataccgatcaggttatcgaagtgtttgtgattggcgtcggtggcgttggcggtgcgctgctggagcaactgaagcgtcagcaaagctggctgaagaataaacatatcgacttacgtgtctgcggtgttgccaactcgaaggctctgctcaccaatgtacatggccttaatctggaaaactggcaggaagaactggcgcaagccaaagagccgtttaatctcgggcgcttaattcgcctcgtgaaagaatatcatctgctgaacccggtcattgttgactgcacttccagccaggcagtggcggatcaatatgccgacttcctgcgcgaaggtttccacgttgtcacgccgaacaaaaaggccaacacctcgtcgatggattactaccatcagttgcgttatgcggcggaaaaatcgcggcgtaaattcctctatgacaccaacgttggggctggattaccggttattgagaacctgcaaaatctgctcaatgcaggtgatgaattgatgaagttctccggcattctttctggttcgctttcttatatcttcggcaagttagacgaaggcatgagtttctccgaggcgaccacgctggcgcgggaaatgggttataccgaaccggacccgcgagatgatctttctggtatggatgtggcgcgtaaactattgattctcgctcgtgaaacgggacgtgaactggagctggcggatattgaaattgaacctgtgctgcccgcagagtttaacgccgagggtgatgttgccgcttttatggcgaatctgtcacaactcgacgatctctttgccgcgcgcgtggcgaaggcccgtgatgaaggaaaagttttgcgctatgttggcaatattgatgaagatggcgtctgccgcgtgaagattgccgaagtggatggtaatgatccgctgttcaaagtgaaaaatggcgaaaacgccctggccttctatagccactattatcagccgctgccgttggtactgcgcggatatggtgcgggcaatgacgttacagctgccggtgtctttgctgatctgctacgtaccctctcatggaagttaggagtctgacatggttaaagtttatgccccggcttccagtgccaatatgagcgtcgggtttgatgtgctcggggcggcggtgacacctgttgatggtgcattgctcggagatgtagtcacggttgaggcggcagagacattcagtctcaacaacctcggacgctttgccgataagctgccgtcagaaccacgggaaaatatcgtttatcagtgctgggagcgtttttgccaggaactgggtaagcaaattccagtggcgatgaccctggaaaagaatatgccgatcggttcgggcttaggctccagtgcctgttcggtggtcgcggcgctgatggcgatgaatgaacactgcggcaagccgcttaatgacactcgtttgctggctttgatgggcgagctggaaggccgtatctccggcagcattcattacgacaacgtggcaccgtgttttctcggtggtatgcagttgatgatcgaagaaaacgacatcatcagccagcaagtgccagggtttgatgagtggctgtgggtgctggcgtatccggggattaaagtctcgacggcagaagccagggctattttaccggcgcagtatcgccgccaggattgcattgcgcacgggcgacatctggcaggcttcattcacgcctgctattcccgtcagcctgagcttgccgcgaagctgatgaaagatgttatcgctgaaccctaccgtgaacggttactgccaggcttccggcaggcgcggcaggcggtcgcggaaatcggcgcggtagcgagcggtatctccggctccggcccgaccttgttcgctctgtgtgacaagccggaaaccgcccagcgcgttgccgactggttgggtaagaactacctgcaaaatcaggaaggttttgttcatatttgccggctggatacggcgggcgcacgagtactggaaaactaaatgaaactctacaatctgaaagatcacaacgagcaggtcagctttgcgcaagccgtaacccaggggttgggcaaaaatcaggggctgttttttccgcacgacctgccggaattcagcctgactgaaattgatgagatgctgaagctggattttgtcacccgcagtgcgaagatcctctcggcgtttattggtgatgaaatcccacaggaaatcctggaagagcgcgtgcgcgcggcgtttgccttcccggctccggtcgccaatgttgaaagcgatgtcggttgtctggaattgttccacgggccaacgctggcatttaaagatttcggcggtcgctttatggcacaaatgctgacccatattgcgggtgataagccagtgaccattctgaccgcgacctccggtgataccggagcggcagtggctcatgctttctacggtttaccgaatgtgaaagtggttatcctctatccacgaggcaaaatcagtccactgcaagaaaaactgttctgtacattgggcggcaatatcgaaactgttgccatcgacggcgatttcgatgcctgtcaggcgctggtgaagcaggcgtttgatgatgaagaactgaaagtggcgctagggttaaactcggctaactcgattaacatcagccgtttgctggcgcagatttgctactactttgaagctgttgcgcagctgccgcaggagacgcgcaaccagctggttgtctcggtgccaagcggaaacttcggcgatttgacggcgggtctgctggcgaagtcactcggtctgccggtgaaacgttttattgctgcgaccaacgtgaacgataccgtgccacgtttcctgcacgacggtcagtggtcacccaaagcgactcaggcgacgttatccaacgcgatggacgtgagtcagccgaacaactggccgcgtgtggaagagttgttccgccgcaaaatctggcaactgaaagagctgggttatgcagccgtggatgatgaaaccacgcaacagacaatgcgtgagttaaaagaactgggctacacttcggagccgcacgctgccgtagcttatcgtgcgctgcgtgatcagttgaatccaggcgaatatggcttgttcctcggcaccgcgcatccggcgaaatttaaagagagcgtggaagcgattctcggtgaaacgttggatctgccaaaagagctggcagaacgtgctgatttacccttgctttcacataatctgcccgccgattttgctgcgttgcgtaaattgatgatgaatcatcagtaaaatctattcattatctcaatcaggccgggtttgcttttatgcagcccggcttttttatgaagaaattatggagaaaaatgacagggaaaaaggagaaattctcaataaatgcggtaacttagagattaggattgcggagaataacaaccgccgttctcatcgagtaatctccggatatcgacccataacgggcaatgataaaaggagtaacctgtgaaaaagatgcaatctatcgtactcgcactttccctggttctggtcgctcccatggcagcacaggctgcggaaattacgttagtcccgtcagtaaaattacagataggcgatcgtgataatcgtggctattactgggatggaggtcactggcgcgaccacggctggtggaaacaacattatgaatggcgaggcaatcgctggcacctacacggaccgccgccaccgccgcgccaccataagaaagctcctcatgatcatcacggcggtcatggtccaggcaaacatcaccgctaaatgacaaatgccgggtaacaatccggcattcagcgcctgatgcgacgctggcgcgtcttatcaggcctacgttaattctgcaatatattgaatctgcatgcttttgtaggcaggataaggcgttcacgccgcatccggcattgactgcaaacttaacgctgctcgtagcgtttaaacaccagttcgccattgctggaggaatcttcatcaaagaagtaaccttcgctattaaaaccagtcagttgctctggtttggtcagccgattttcaataatgaaacgactcatcagaccgcgtgctttcttagcgtagaagctgatgatcttaaatttgccgttcttctcatcgaggaacaccggcttgataatctcggcattcaatttcttcggcttcaccgatttaaaatactcatctgacgccagattaatcaccacattatcgccttgtgctgcgagcgcctcgttcagcttgttggtgatgatatctccccagaattgatacagatctttccctcgggcattctcaagacggatccccatttccagacgataaggctgcattaaatcgagcgggcggagtacgccatacaagccggaaagcattcgcaaatgctgttgggcaaaatcgaaatcgtcttcgctgaaggtttcggcctgcaagccggtgtagacatcacctttaaacgccagaatcgcctggcgggcattcgccggcgtgaaatctggctgccagtcatgaaagcgagcggcgttgatacccgccagtttgtcgctgatgcgcatcagcgtgctaatctgcggaggcgtcagtttccgcgcctcatggatcaactgctgggaattgtctaacagctccggcagcgtatagcgcgtggtggtcaacgggctttggtaatcaagcgttttcgcaggtgaaataagaatcagcatatccagtccttgcaggaaatttatgccgactttagcaaaaaatgagaatgagttgatcgatagttgtgattactcctgcgaaacatcatcccacgcgtccggagaaagctggcgaccgatatccggataacgcaatggatcaaacaccgggcgcacgccgagtttacgctggcgtagataatcactggcaatggtatgaaccacaggcgagagcagtaaaatggcggtcaaattggtaatagccatgcaggccattatgatatctgccagttgccacatcagcggaaggcttagcaaggtgccgccgatgaccgttgcgaaggtgcagatccgcaaacaccagatcgctttagggttgttcaggcgtaaaaagaagagattgttttcggcataaatgtagttggcaacgatggagctgaaggcaaacagaataaccacaagggtaacaaactcagcaccccaggaacccattagcacccgcatcgccttctggataagctgaataccttccagcggcatgtaggttgtgccgttacccgccagtaatatcagcatggcgcttgccgtacagatgaccagggtgtcgataaaaatgccaatcatctggacaatcccttgcgctgccggatgcggaggccaggacgccgctgccgctgccgcgtttggcgtcgaacccattcccgcctcattggaaaacatactgcgctgaaaaccgttagtaatcgcctggcttaaggtatatcccgccgcgccgcctgccgcttcctgccagccaaaagcactctcaaaaatagaccaaatgacgtggggaagttgcccgatattcattacgcaaattaccaggctggtcagtacccagattatcgccatcaacgggacaaagccctgcatgagccgggcgacgccatgaagaccgcgagtgattgccagcagagtaaagacagcgagaataatgcctgtcaccagcgggggaaaatcaaaagaaaaactcagggcgcgggcaacggcgttcgcttgaactccgctgaaaattatgccataggcgatgagcaaaaagacggcgaacagaacgcccatccagcgcatccccagcccgcgcgccatataccatgccggtccgccacgaaactgcccattgacgtcacgttctttataaagttgtgccagagaacattcggcaaacgaggtcgccatgccgataaacgcggcaacccacatccaaaagacggctccaggtccaccggcggtaatagccagcgcaacgccggccaggttgccgctacccacgcgcgccgcaagactggtacacaatgactgaaatgaggttaaaccgcctggctgtggatgaatgctatttttaagacttttgccaaactggcggatgtagcgaaactgcacaaatccggtgcgaaaagtgaaccaacaacctgcgccgaagagcaggtaaatcattaccgatccccaaaggacgctgttaatgaaggagaaaaaatctggcatgcatatccctcttattgccggtcgcgatgactttcctgtgtaaacgttaccaattgtttaagaagtatatacgctacgaggtacttgataacttctgcgtagcatacatgaggttttgtataaaaatggcgggcgatatcaacgcagtgtcagaaatccgaaacagtctcgcctggcgataaccgtcttgtcggcggttgcgctgacgttgcgtcgtgatatcatcagggcagaccggttacatccccctaacaagctgtttaaagagaaatactatcatgacggacaaattgacctcccttcgtcagtacaccaccgtagtggccgacactggggacatcgcggcaatgaagctgtatcaaccgcaggatgccacaaccaacccttctctcattcttaacgcagcgcagattccggaataccgtaagttgattgatgatgctgtcgcctgggcgaaacagcagagcaacgatcgcgcgcagcagatcgtggacgcgaccgacaaactggcagtaaatattggtctggaaatcctgaaactggttccgggccgtatctcaactgaagttgatgcgcgtctttcctatgacaccgaagcgtcaattgcgaaagcaaaacgcctgatcaaactctacaacgatgctggtattagcaacgatcgtattctgatcaaactggcttctacctggcagggtatccgtgctgcagaacagctggaaaaagaaggcatcaactgtaacctgaccctgctgttctccttcgctcaggctcgtgcttgtgcggaagcgggcgtgttcctgatctcgccgtttgttggccgtattcttgactggtacaaagcgaataccgataagaaagagtacgctccggcagaagatccgggcgtggtttctgtatctgaaatctaccagtactacaaagagcacggttatgaaaccgtggttatgggcgcaagcttccgtaacatcggcgaaattctggaactggcaggctgcgaccgtctgaccatcgcaccggcactgctgaaagagctggcggagagcgaaggggctatcgaacgtaaactgtcttacaccggcgaagtgaaagcgcgtccggcgcgtatcactgagtccgagttcctgtggcagcacaaccaggatccaatggcagtagataaactggcggaaggtatccgtaagtttgctattgaccaggaaaaactggaaaaaatgatcggcgatctgctgtaatcattcttagcgtgaccgggaagtcggtcacgctacctcttctgaagcctgtctgtcactcccttcgcagtgtatcattctgtttaacgagactgtttaaacggaaaaatcttgatgaatactttacgtattggcttagtttccatctctgatcgcgcatccagcggcgtttatcaggataaaggcatccctgcgctggaagaatggctgacatcggcgctaaccacgccgtttgaactggaaacccgcttaatccccgatgagcaggcgatcatcgagcaaacgttgtgtgagctggtggatgaaatgagttgccatctggtgctcaccacgggcggaactggcccggcgcgtcgtgacgtaacgcccgatgcgacgctggcagtagcggaccgcgagatgcctggctttggtgaacagatgcgccagatcagcctgcattttgtaccaactgcgatcctttcgcgtcaggtgggcgtgattcgcaaacaggcgctgatccttaacttacccggtcagccgaagtctattaaagagacgctggaaggtgtgaaggacgctgagggtaacgttgtggtacacggtatttttgccagcgtaccgtactgcattcagttgctggaagggccatacgttgaaacggcaccggaagtggttgcagcattcagaccgaagagtgcaagacgcgacgttagcgaataaaaaaatccccccgagcggggggatctcaaaacaattagtgggattcaccaatcggcagaacggtgcgaccaaactgctcgttcagtacttcacccatcgccagatagattgcgctggcaccgcagatcagcccaatccagccggcaaagtggatgattgcggcgttaccggcaatgttaccgatcgccagcagggcaaacagcacggtcaggctaaagaaaacgaattgcagaacgcgtgcgcctttcagcgtgccgaagaacataaacagcgtaaatacgccccacagacccaggtagacaccaaggaactgtgcatttggcgcatcggtcagacccagtttcggcatcagcagaatcgcaaccagcgtcagccagaaagaaccgtaagaggtgaatgcggttaaaccgaaagtgttgccttttttgtactccagcagaccagcaaaaatttgcgcgatgccgccgtagaaaatgcccatggcaagaataataccgtccagagcgaaataacccacgttgtgcaggttaagcagaatggtggtcatgccgaagcccatcaggcccagcggtgccggattagccaacttagtgttgcccataattcctcaaaaatcatcatcgaatgaatggtgaaataatttccctgaataactgtagtgttttcagggcgcggcataataatcagccagtggggcagtgtctacgatcttttgaggggaaaatgaaaattttccccggtttccggtatcagacctgagtggcgctaaccatccggcgcaggcaggcgatttgcagtacggctggaatcgtcacgcgataggcgctgccgctgaccgctttaaccccatttagtgccgcacctacagggcctcccagccccgcgccgcgcagcaaaccatgcccaagtacgctcattgctgcgtgggtgcgtaaaatgcgggtcagttggctggaaagcaaatgcgacacaccttttgccaataatttgtctttcatcagcagcggcagcagctcttccagctcattcaccctggcatcgaccgcgtgcagaaactcctgcttatgttcctcgtccattttcttccaggtattacgcagaaattgttccagtaactgttgctcaatttcaaacgtagacatctctttgtcggctttcagcttcaatcgctttgaaacatcgagcaaaatggcccgatacaatttaccgtgtccgcgcagtttgttggcgatactatcgccaccaaaatgctgtaattctccggcaatcagctgccagttgcggcgatgttgctcgggatgcccttccatcgatttaaacagttcgttgcgcatcagtacgctggagaggcgagttttgcctttttcattatgggtgagcaatcgggcgaaatttgccaactgttcctcactacaatgctgaagaaaatccagatctgaatcattcaggtaattaacattcattttttgtggcttctatattctggcgttagtcgtcgccgataattttcagcgtggccatatccgatgagttcaccgtatgacccgaaaaggtgatttttgagacgcagcgtttattgtcgttatcgctgttaatgttgatccagtcagtggtttgcccttcttttatttctgaaggaatattcaggctctgactggcgctacgggcggctttgaaataaaccgatgcaccgcttaactgtaaatcgccatggtcggcagagagttgtatgcgtttcacaatgcgacaaacaggaagtttcagcgccagatcgttggtttcgttacgcggcattgcaatggcgccgaggagtttatggtcgtttgcctgcgccgtgcagcacagcatcaggctaatcgccaggctggcggaaatcgtaaaaacggatttcataaggattctcttagtgggaagaggtagggggatgaatacccactagtttactgctgataaagagaagattcaggcacgtaatcttttctttttattacaattttttgatgaatgccttggctgcgattcattctttatatgaataaaattgctgtcaattttacgtcttgtcctgccatatcgcgaaatttctgcgcaaaagcacaaaaaatttttgcatctcccccttgatgacgtggtttacgaccccatttagtagtcaaccgcagtgagtgagtctgcaaaaaaatgaaattgggcagttgaaaccagacgtttcgcccctattacagactcacaaccacatgatgaccgaatatatagtggagacgtttagatgggtaaaataattggtatcgacctgggtactaccaactcttgtgtagcgattatggatggcaccactcctcgcgtgctggagaacgccgaaggcgatcgcaccacgccttctatcattgcctatacccaggatggtgaaactctagttggtcagccggctaaacgtcaggcagtgacgaacccgcaaaacactctgtttgcgattaaacgcctgattggtcgccgcttccaggacgaagaagtacagcgtgatgtttccatcatgccgttcaaaattattgctgctgataacggcgacgcatgggtcgaagttaaaggccagaaaatggcaccgccgcagatttctgctgaagtgctgaaaaaaatgaagaaaaccgctgaagattacctgggtgaaccggtaactgaagctgttatcaccgtaccggcatactttaacgatgctcagcgtcaggcaaccaaagacgcaggccgtatcgctggtctggaagtaaaacgtatcatcaacgaaccgaccgcagctgcgctggcttacggtctggacaaaggcactggcaaccgtactatcgcggtttatgacctgggtggtggtactttcgatatttctattatcgaaatcgacgaagttgacggcgaaaaaaccttcgaagttctggcaaccaacggtgatacccacctggggggtgaagacttcgacagccgtctgatcaactatctggttgaagaattcaagaaagatcagggcattgacctgcgcaacgatccgctggcaatgcagcgcctgaaagaagcggcagaaaaagcgaaaatcgaactgtcttccgctcagcagaccgacgttaacctgccatacatcactgcagacgcgaccggtccgaaacacatgaacatcaaagtgactcgtgcgaaactggaaagcctggttgaagatctggtaaaccgttccattgagccgctgaaagttgcactgcaggacgctggcctgtccgtatctgatatcgacgacgttatcctcgttggtggtcagactcgtatgccaatggttcagaagaaagttgctgagttctttggtaaagagccgcgtaaagacgttaacccggacgaagctgtagcaatcggtgctgctgttcagggtggtgttctgactggtgacgtaaaagacgtactgctgctggacgttaccccgctgtctctgggtatcgaaaccatgggcggtgtgatgacgacgctgatcgcgaaaaacaccactatcccgaccaagcacagccaggtgttctctaccgctgaagacaaccagtctgcggtaaccatccatgtgctgcagggtgaacgtaaacgtgcggctgataacaaatctctgggtcagttcaacctagatggtatcaacccggcaccgcgcggcatgccgcagatcgaagttaccttcgatatcgatgctgacggtatcctgcacgtttccgcgaaagataaaaacagcggtaaagagcagaagatcaccatcaaggcttcttctggtctgaacgaagatgaaatccagaaaatggtacgcgacgcagaagctaacgccgaagctgaccgtaagtttgaagagctggtacagactcgcaaccagggcgaccatctgctgcacagcacccgtaagcaggttgaagaagcaggcgacaaactgccggctgacgacaaaactgctatcgagtctgcgctgactgcactggaaactgctctgaaaggtgaagacaaagccgctatcgaagcgaaaatgcaggaactggcacaggtttcccagaaactgatggaaatcgcccagcagcaacatgcccagcagcagactgccggtgctgatgcttctgcaaacaacgcgaaagatgacgatgttgtcgacgctgaatttgaagaagtcaaagacaaaaaataatcgccctataaacgggtaattatactgacacgggcgaaggggaatttcctctccgcccgtgcattcatctaggggcaatttaaaaaagatggctaagcaagattattacgagattttaggcgtttccaaaacagcggaagagcgtgaaatcagaaaggcctacaaacgcctggccatgaaataccacccggaccgtaaccagggtgacaaagaggccgaggcgaaatttaaagagatcaaggaagcttatgaagttctgaccgactcgcaaaaacgtgcggcatacgatcagtatggtcatgctgcgtttgagcaaggtggcatgggcggcggcggttttggcggcggcgcagacttcagcgatatttttggtgacgttttcggcgatatttttggcggcggacgtggtcgtcaacgtgcggcgcgcggtgctgatttacgctataacatggagctcaccctcgaagaagctgtacgtggcgtgaccaaagagatccgcattccgactctggaagagtgtgacgtttgccacggtagcggtgcaaaaccaggtacacagccgcagacttgtccgacctgtcatggttctggtcaggtgcagatgcgccagggattcttcgctgtacagcagacctgtccacactgtcagggccgcggtacgctgatcaaagatccgtgcaacaaatgtcatggtcatggtcgtgttgagcgcagcaaaacgctgtccgttaaaatcccggcaggggtggacactggagaccgcatccgtcttgcgggcgaaggtgaagcgggcgagcatggcgcaccggcaggcgatctgtacgttcaggttcaggttaaacagcacccgattttcgagcgtgaaggcaacaacctgtattgcgaagtcccgatcaacttcgctatggcggcgctgggtggcgaaatcgaagtaccgacccttgatggtcgcgtcaaactgaaagtgcctggcgaaacccagaccggtaagctattccgtatgcgcggtaaaggcgtcaagtctgtccgcggtggcgcacagggtgatttgctgtgccgcgttgtcgtcgaaacaccggtaggcctgaacgaaaggcagaaacagctgctgcaagagctgcaagaaagcttcggtggcccaaccggcgagcacaacagcccgcgctcaaagagcttctttgatggtgtgaagaagttttttgacgacctgacccgctaacctccccaaaagcctgcccgtgggcaggcctgggtaaaaatagggtgcgttgaagatatgcgagcacctgtaaagtggcggggatcactcccataagcgctaacttaagggttgtggtattacgcctgatatgatttaacgtgccgatgaattactctcacgataactggtcagcaattctggcccatattggtaagcccgaagaactggatacttcggcacgtaatgccggggctctaacccgccgccgcgaaattcgtgatgctgcaactctgctacgtctggggctggcttacggccccggggggatgtcattacgtgaagtcactgcatgggctcagctccatgacgttgcaacattatctgacgtggctctcctgaagcggctgcggaatgccgccgactggtttggcatacttgccgcacaaacacttgctgtacgcgccgcagttacgggttgtacaagcggaaagagattgcgtcttgtcgatggaacagcaatcagtgcgcccgggggcggcagcgctgaatggcgactacatatgggatatgatcctcatacctgtcagttcactgattttgagctaaccgacagcagagacgctgaacggctggaccgatttgcgcaaacggcagacgagatacgcattgctgaccggggattcggttcgcgtcccgaatgtatccgctcacttgcttttggagaagctgattatatcgtccgggttcactggcgaggattgcgctggttaactgcagaaggaatgcgctttgacatgatgggttttctgcgcgggctggattgcggtaagaacggtgaaaccactgtaatgataggcaattcaggtaataaaaaagccggagctccctttccggcacgtctcattgccgtatcacttcctcccgaaaaagcattaatcagtaaaacccgactgctcagcgagaatcgtcgaaaaggacgagtagttcaggcggaaacgctggaagcagcgggccatgtgctattgctaacatcattaccggaagatgaatattcagcagagcaagtggctgattgttaccgtctgcgatggcaaattgaactggcttttaagcggctcaaaagtttgctgcacctggatgctttgcgtgcaaaggaacctgaactcgcgaaagcgtggatatttgctaatctactcgccgcatttttaattgacgacataatccagccatcgctggatttcccccccagaagtgccggatccgaaaagaagaactaactcgttgtggagaataacaaaaatggtcatctggagcttacaggtggccattcgtgggacagtatccctgacagcctacaaaacgcaattgaagaacgcgaggcatcgtcttaacgaggcaccgaggcgtcgcattcttcagatggttcaacccttaagttagcgcttatgggatcactccccgccgttgctcttactcggattcgtaagccgtgaaaacagcaacctccgtctggccagttcggatgtgaacctcacagaggtcttttctcgttaccagcgccgccactacggcggtgatacagatgacgatcagggcgacaatcatcgccttatgctgcttcattgctctcttctccttgaccttacggtcagtaagaggcactctacatgtgttcagcatataggaggcctcgggttgatggtaaaatatcactcggggcttttctctatctgccgttcagctaatgcctgagacagacagcctcaagcacccgccgctattatatcgctctctttaacccattttgttttatcgattctaatcctgaagacgcctcgcatttttgtggcgtaattttttaatgatttaattatttaactttaatttatctcttcatcgcaattattgacgacaagctggattatttttgaaatattggcctaacaagcatcgccgactgacaacaaattaattattacttttcctaattaatccctcaggaatcctcaccttaagctatgattatctaggcttagggtcactcgtgagcgcttacagccgtcaaaaacgcatctcaccgctgatggcgcaaattcttcaatagctcgtaaaaaacgaattattcctacactataatctgattttaacgatgattcgtgcggggtaaaatagtaaaaacgatctattcacctgaaagagaaataaaaagtgaaacatctgcatcgattctttagcagtgatgcctcgggaggcattattcttatcattgccgctatcctggcgatgattatggccaacagcggcgcaaccagtggatggtatcacgactttctggagacgccggttcagctccgggttggttcactcgaaatcaacaaaaacatgctgttatggataaatgacgcgctgatggcggtatttttcctgttagtcggtctggaagttaaacgtgaactgatgcaaggatcgctagccagcttacgccaggccgcatttccagttatcgccgctattggtgggatgattgtgccggcattactctatctggcttttaactatgccgatccgattacccgcgaagggtgggcgatcccggcggctactgacattgcttttgcacttggtgtactggcgctgttgggaagtcgtgttccgttagcgctgaagatctttttgatggctctggctattatcgacgatcttggggccatcattatcatcgcattgttctacactaatgacttatcgatggcctctcttggcgtcgcggctgtagcaattgcggtactcgcggtattgaatctgtgtggtgcacgccgcacgggcgtctatattcttgttggcgtggtgttgtggactgcggtgttgaaatcgggggttcacgcaactctggcgggggtaattgtcggcttctttattcctttgaaagagaagcatgggcgttctccagcgaagcgactggagcatgtgttgcacccgtgggtggcgtatctgattttgccgctgtttgcatttgctaatgctggcgtttcactgcaaggcgtcacgctggatggcttgacctccattctgccattggggatcatcgctggcttgctgattggcaaaccgctggggattagtctgttctgctggttggcgctgcgtttgaaactggcgcatctgcctgagggaacgacttatcagcaaattatggtggtggggatcctgtgcggtatcggttttactatgtctatctttattgccagcctggcctttggtagcgtagatccagaactgattaactgggcgaaactcggtatcctggtcggttctatctcttcggcggtaattggatacagctggttacgcgttcgtttgcgtccatcagtttgacaggacggtttaccggggagccataaacggctcccttttcattgttatcagggagagaaatgagcatgtctcatatcaattacaaccacttgtattacttctggcatgtctataaagaaggttccgtggttggcgcagcggaggcgctttatttaactccacaaaccattaccggacagattcgagcgctggaagagcgcctgcaaggcaaattatttaaacgcaagggacgtggtctcgaacccagcgagctgggagaactggtctatcgctatgccgataaaatgttcaccttaagccaggaaatgctggatattgtgaactatcgcaaagaatccaatttattgtttgacgttggcgtggctgatgcactttccaaacgcctggtcagtagcgtacttaacgccgcagtggtagaaggcgagcccattcatcttcgctgcttcgaatccacccacgaaatgctgctggagcaattaagtcagcataaactggatatgatcatttctgactgtccgatagactctacgcagcaggaaggcctgttctccgtgagaattggcgaatgtggcgtgagtttctggtgtacaaatccaccaccagaaaaaccgttcccggcttgtctggaagaacggcgacttttgattcctgggcgacgttcaatgttagggcgcaaattgcttaactggtttaactcccagggattaaacgtagaaatcctcggcgagtttgatgatgccgctttgatgaaagcttttggtgcgatgcacaatgcaatcttcgttgccccaacgctttatgcatatgacttttatgccgataaaactgtcgtagaaattggtcgcgtcgagaatgtgatggaagagtaccatgctatttttgctgagcggatgattcagcacccggcggtacagcgaatctgcaatacggattattctgcgctttttagtccagcggtgcgttaatcggcagctcccccaaagttaaggtgggggagatagattagttgtacattaccacgattttgactcggctcattatttgcccgcttgagacattgtttccatatgtacgcgggcgaataaatagaggaatctgattacttccttcatggggatgctgaaaagagtagtaattgctggtaatgactccaacttattgatagtgttttatgttcagataatgcccgatgactttgtcatgcagctccaccgattttgagaacgacagcgacttccgtcccagccgtgccaggtgctgcctcagattcaggttatgccgctcaattcgctgcgtatatcgcttgctgattacgtgcagctttcccttcaggcgggattcatacagcggccagccatccgtcatccatatcaccacgtcaaagggtgacagcaggctcataagacgccccagcgtcgccatagtgcgttcaccgaatacgtgcgcaacaaccgtcttccggagactgtcatacgcgtaaaacagccagcgctggcgcgatttagccccgacatagccccactgttcgtccatttccgcgcagacgatgacgtcactgcccggctgtatgcgcgaggttaccgactgcggcctgagttttttaagtgacgtaaaatcgtgttgaggccaacgcccataatgcgggctgttgcccggcatccaacgccattcatggccatatcaatgattttctggtgcgtaccgggttgagaagcggtgtaagtgaactgcagttgccatgttttacggcagtgagagcagagatagcgctgatgtccggcggtgcttttgccgttacgcaccaccccgtcagtagctgaacaggagggacagctgatagaaacagaagccactggagcacctcaaaaacaccatcatacactaaatcagtaagttggcagcatcacctacctcaatgtgtatcacaatatccatattctttgtgggggagtctggagattgagtagatattcttgttcagaatgtatcagccgatggttctacgattcttaagccacgaagagttcagatagtacaacggcatgtctcttttgactatctggcaaccggcagtgtgttctctcacgcatcacaaaagcagcaggcataaaaaaacccgcttgcgcgggctttttcacaaagcttcagcaaattggcgattaagccagtttgttgatctgtgcagtcaggttagccttatgacgtgcagctttgtttttgtggatcagacctttagcagcytgacggtccacgatcggttgcatttcgttaaatgctttctgtgcagcagctttgtcgccagcttcgatagctgcgtatactttcttgatgaaagtacgcatcatagagcgacggcttgcgttgtgcttacgagccttttcagactgaatggcgcgcttcttagctgatttgatattagccaaggtccaactcccaaatgtgttctatatggacaattcaaaggccgaggaatatgcccttttagccttcttttgtcaatggatttgtgcaaataagcgccgttaatgtgccggcactcgttacgtagtgatggcgcaggattctaccagcttgcggggtgtgaatacagcttttccgcgataaaaattgcagcaggcggtcagtttcttcccgtgatttgcgccatggcaatgaaaagccacttctttctgatttcggtactcaatcgccggttaaccttgaccgctgtacaaggtatactcggacgattttcactgttttgagccagacatgaagctgatacgcggcatacataatctcagccaggccccgcaagaagggtgtgtgctgactattggtaatttcgacggcgtgcatcgcggtcatcgcgcgctgttacagggcttgcaggaagaagggcgcaagcgcaacttaccggtgatggtgatgctttttgaacctcaaccactggaactgtttgctaccgataaagccccggcaagactgacccggctgcgggaaaaactgcgttaccttgcagagtgtggcgttgattacgtgctgtgcgtgcgtttcgacaggcgtttcgcggcgttaaccgcgcaaaatttcatcagcgatcttctggtgaagcatttgcgcgtaaaatttcttgccgtaggtgatgatttccgctttggcgctggtcgtgaaggcgatttcttgttattacagaaagctggcatggaatacggcttcgatatcaccagtacgcaaactttttgcgaaggtggcgtgcgcatcagcagcaccgccgtgcgtcaggcccttgcggatgacaatctggctctggcagagagtttactggggcacccgtttgccatctccgggcgtgtagtccacggtgatgaattagggcgcactataggtttcccgacggcgaatgtaccgctgcgccgtcaggtttccccggtgaaaggggtttatgcggtagaagtgctgggcctcggtgaaaagccgttacccggcgtggcaaacatcggaacacgcccaacggttgccggtattcgccagcagctggaagtgcatttgttagatgttgcaatggacctttacggtcgccatatacaagtagtgctgcgtaaaaaaatacgcaatgagcagcgatttgcgtcgctggacgaactgaaagcgcagattgcgcgtgatgaattaaccgcccgcgaattttttgggctaacaaaaccggcttaagcctgttatgtaatcaaaccgaaatacggaaccgagaatctgatgagtgactataaatcaaccctgaatttgccggaaacagggttcccgatgcgtggcgatctcgccaagcgcgaacccggaatgctggcgcgttggactgatgatgatctgtacggcatcatccgtgcggctaaaaaaggcaaaaaaaccttcattctgcatgatggccctccttatgcgaatggcagcattcatattggtcactcggttaacaagattctgaaagacattatcgtgaagtccaaagggctttccggttatgactcgccgtatgtgcctggctgggactgccacggtctgccgatcgagctgaaagtcgagcaagaatacggtaagccgggtgagaaattcaccgccgccgagttccgcgccaagtgccgcgaatacgcggcgacccaggttgacggtcaacgcaaagactttatccgtctgggcgtgctgggcgactggtcgcacccgtacctgaccatggacttcaaaactgaagccaacatcatccgcgcgctgggcaaaatcatcggcaacggtcacctgcacaaaggcgcgaagccagttcactggtgcgttgactgccgttctgcgctggcggaagcggaagttgagtattacgacaaaacttctccgtccatcgacgttgctttccaggcagtcgatcaggatgcactgaaagcaaaatttgccgtaagcaacgttaacggcccaatctcgctggtaatctggaccaccacgccgtggactctgcctgccaaccgcgcaatctctattgcaccagatttcgactatgcgctggtgcagatcgacggtcaggccgtgattctggcgaaagatctggttgaaagcgtaatgcagcgtatcggcgtgaccgattacaccattctcggcacggtaaaaggtgcggagcttgagctgctgcgctttacccatccgtttatgggcttcgacgttccggcaatcctcggcgatcacgttaccctggatgccggtaccggtgccgttcacaccgcgcctggccacggcccggacgactatgtgatcggtcagaaatacggcctggaaaccgctaacccggttggcccggacggcacttatctgccgggcacttatccgacgctggatggcgtgaacgtcttcaaagcgaacgacatcgtcgttgcgctgctgcaggaaaaaggcgcgctgctgcacgttgagaaaatgcagcacagctatccgtgctgctggcgtcacaaaacgccgatcatcttccgcgcgacgccgcagtggttcgtcagcatggatcagaaaggtctgcgtgcgcagtcactgaaagagatcaaaggcgtgcagtggatcccggactggggccaggcgcgtatcgagtcgatggttgctaaccgtcctgactggtgtatctcccgtcagcgcacctggggtgtaccgatgtcactgttcgtgcacaaagacacggaagagctgcatccgcgtacccttgaactgatggaagaagtggcaaaacgcgttgaagtcgatggcatccaggcgtggtgggatctcgatgcgaaagagatcctcggcgacgaagctgatcagtacgtgaaagtgccggacacattggatgtatggtttgactccggatctacccactcttctgttgttgacgtgcgtccggaatttgccggtcacgcagcggacatgtatctggaaggttctgaccaacaccgcggctggttcatgtcttccctaatgatctccaccgcgatgaagggtaaagcgccgtatcgtcaggtactgacccacggctttaccgtggatggtcagggccgcaagatgtctaaatccatcggcaataccgtttcgccgcaggatgtgatgaacaaactgggcgcggatattctgcgtctgtgggtggcatcaaccgactacaccggtgaaatggccgtttctgacgagatcctgaaacgtgctgccgatagctatcgtcgtatccgtaacaccgcgcgcttcctgctggcaaacctgaacggttttgatccagcaaaagatatggtgaaaccggaagagatggtggtactggatcgctgggccgtaggttgtgcgaaagcggcacaggaagacatcctcaaggcgtacgaagcatacgatttccacgaagtggtacagcgtctgatgcgcttctgctccgttgagatgggttccttctacctcgacatcatcaaagaccgtcagtacaccgccaaagcggacagtgtggcgcgtcgtagctgccagactgcgctatatcacatcgcagaagcgctggtgcgctggatggcaccaatcctctccttcaccgctgatgaagtgtggggctacctgccgggcgaacgtgaaaaatacgtcttcaccggtgagtggtacgaaggcctgtttggcctggcagacagtgaagcgatgaacgatgcgttctgggacgagctgttgaaagtgcgtggcgaagtgaacaaagtcattgagcaagcgcgtgccgacaagaaagtgggtggctcgctggaagcggcagtaaccttgtatgcagaaccggaactgtcggcgaaactgaccgcgctgggcgatgaattacgatttgtcctgttgacctccggcgctaccgttgcagactataacgacgcacctgctgatgctcagcagagcgaagtactcaaagggctgaaagtcgcgttgagtaaagccgaaggtgagaagtgcccacgctgctggcactacacccaggatgtcggcaaggtggcggaacacgcagaaatctgcggccgctgtgtcagcaacgtcgccggtgacggtgaaaaacgtaagtttgcctgatgagtcaatcgatctgttcaacagggctacgctggctgtggctggtggtagtcgtgctgattatcgatctgggcagcaaatacctgatcctccagaactttgctctgggggatacggtcccgctgttcccgtcgcttaatctgcattatgcgcgtaactatggcgcggcgtttagtttccttgccgatagcggcggctggcagcgttggttctttgccggtattgcgattggtattagcgtgatcctggcagtgatgatgtatcgctcgaaggccacgcagaagctaaacaatatcgcttacgcgctgattattggcggcgcgctgggcaacctgttcgaccgcctgtggcacggcttcgttgtcgatatgatcgacttctacgtcggcgactggcacttcgccaccttcaaccttgccgatactgccatctgtgtcggtgcggcactgattgtgctggaaggttttttgccttctagagcgaaaaaacaataataaaccctgccggatgcgatgctgacgcatcttatccggcctacagattgctgcgaaatcgtaggccggataaggcgtttacgccgcatccggcaaaaatccttaaatataagagcaaacctgcatgtctgaatctgtacagagcaatagcgccgtcctggtgcacttcacgctaaaactcgacgatggcaccaccgccgagtctacccgcaacaacggtaaaccggcgctgttccgcctgggtgatgcttctctttctgaagggctggagcaacacctgttggggctgaaagtgggcgataaaaccaccttctcgttggagccagatgcggcgtttggcgtgccgtcaccggacctgattcagtacttctcccgccgtgaatttatggatgcaggcgagccagaaattggcgcaatcatgctttttaccgcaatggatggcagtgagatgcctggcgtgatccgcgaaattaacggcgactccattaccgttgatttcaaccatccgctggccgggcagaccgttcattttgatattgaagtgctggaaatcgatccggcactggaggcgtaacatgcagatcctgttggccaacccgcgtggtttttgtgccggggtagaccgcgctatcagcattgttgaaaacgcgctggccatttacggcgcaccgatatatgtccgtcacgaagtggtacataaccgctatgtggtcgatagcttgcgtgagcgtggggctatctttattgagcagattagcgaagtaccggacggcgcgatcctgattttctccgcacacggtgtttctcaggcggtacgtaacgaagcaaaaagtcgcgatttgacggtgtttgatgccacctgtccgctggtgaccaaagtgcatatggaagtcgcccgcgccagtcgccgtggcgaagaatctattctcatcggtcacgccgggcacccggaagtggaagggacaatgggccagtacagtaacccggaagggggaatgtatctggtcgaatcgccggacgatgtgtggaaactgacggtcaaaaacgaagagaagctctcctttatgacccagaccacgctgtcggtggatgacacgtctgatgtgatcgacgcgctgcgtaaacgcttcccgaaaattgtcggtccgcgcaaagatgacatctgctacgccacgactaaccgtcaggaagcggtacgcgccctggcagaacaggcggaagttgtgttggtggtcggttcgaaaaactcctccaactccaaccgtctggcggagctggcccagcgtatgggcaaacgcgcgtttttgattgacgatgcgaaagacatccaggaagagtgggtgaaagaggttaaatgcgtcggcgtgactgcgggcgcatcggctccggatattctggtgcagaatgtggtggcacgtttgcagcagctgggcggtggtgaagccattccgctggaaggccgtgaagaaaacattgttttcgaagtgccgaaagagctgcgtgtcgatattcgtgaagtcgattaagtcattagcagcctaagttatgcgaaaatgccggtcttgttaccggcattttttatggagaaaacatgcgtttacctatcttcctcgatactgaccccggcattgacgatgccgtcgccattgccgccgcgatttttgcacccgaactcgacctgcaactgatgaccaccgtcgcgggtaatgtctcggttgagaaaactacccgcaatgccctgcaactgctgcatttctggaatgcggagattccgctcgcccaaggggccgctgtgccactggtacgcgcaccgcgtgatgcggcatctgtgcacggcgaatcgggaatggctggctacgactttgttgagcacaaccgaaagccgctcgggataccggcgtttctggcgattcgggatgccctgatgcgtgcaccagagcctgttaccctggtggccatcggcccgttaaccaatattgcgctgttactttcacaatgcccggaatgcaagccgtatattcgccgtctggtgatcatgggtggttctgccggacgcggcaactgtacgccaaacgccgagtttaatattgctgccgatccagaagctgctgcctgtgtcttccgcagtggtattgaaatcgtcatgtgcggtttggatgtcaccaatcaggcaatattaactcctgactatctctctacactgccgcagttaaaccgtaccgggaaaatgcttcacgccctgtttagccactaccgtagcggcagtatgcaaagcggcttgcgaatgcacgatctctgcgccatcgcctggctggtgcgcccggacctgttcactctcaaaccctgttttgtggcagtggaaactcagggcgaatttacctcaggcacgacggtggttgatatcgacggttgcctgggcaagccagccaatgtacaggtggcattggatctggatgtgaaaggcttccagcagtgggtggctgaggtgctggctctggcgtcgtaacctgtcacatgttattggcatgcagtcattcatcgactcatgcctttcactgatatccctccctgtttatcattaatttctaattatcagcgtttttggctggcggcgtagcgatgcgctggttactctgaaaacggtctatgcaaattaacaaaagagaatagctatgcatgatgcaaacatccgcgttgccatcgcgggagccggggggcgtatgggccgccagttgattcaggcggcgctggcattagagggcgtgcagttgggcgctgcgctggagcgtgaaggatcttctttactgggcagcgacgccggtgagctggccggagccgggaaaacaggcgttaccgtgcaaagcagcctcgatgcggtaaaagatgattttgatgtgtttatcgattttacccgtccggaaggtacgctgaaccatctcgctttttgtcgccagcatggcaaagggatggtgatcggcactacggggtttgacgaagccggtaaacaagcaattcgtgacgccgctgccgatattgcgattgtctttgctgccaattttagcgttggcgttaacgtcatgcttaagctgctggagaaagcagccaaagtgatgggtgactacaccgatatcgaaattattgaagcacatcatagacataaagttgatgcgccgtcaggcaccgcactggcaatgggagaggcgatcgcccacgcccttgataaagatctgaaagattgcgcggtctacagtcgtgaaggccacaccggtgaacgtgtgcctggcaccattggttttgccaccgtgcgtgcaggtgacatcgttggtgaacataccgcgatgtttgccgatattggcgagcgtctggagatcacccataaggcgtccagccgtatgacatttgctaacggcgcggtaagatcggctttgtggttgagtggtaaggaaagcggtctttttgatatgcgagatgtacttgatctcaataatttgtaaccacaaaatatttgttatggtgcaaaaataacacatttaatttattgattataaagggctttaatttttggcccttttatttttggtgttatgtttttaaattgtctataagtgccaaaaattacatgttttgtcttctgtttttgttgttttaatgtaaattttgaccatttggtccacttttttctgctcgtttttatttcatgcaatcttcttgctgcgcaagcgttttccagaacaggttagatgatctttttgtcgcttaatgcctgtaaaacatgcatgagccacaaaataatataaaaaatcccgccattaagttgacttttagcgcccatatctccagaatgccgccgtttgccagaaattcgtcggtaagcagatttgcattgatttacgtcatcattgtgaattaatatgcaaataaagtgagtgaatattctctggagggtgttttgattaagtcagcgctattggttctggaagacggaacccagtttcacggtcgggccataggggcaacaggttcggcggttggggaagtcgttttcaatacttcaatgaccggttatcaagaaatcctcactgatccttcctattctcgtcaaatcgttactcttacttatccccatattggcaatgtcggcaccaatgacgccgatgaagaatcttctcaggtacatgcacaaggtctggtgattcgcgacctgccgctgattgccagcaacttccgtaataccgaagacctctcttcttacctgaaacgccataacatcgtggcgattgccgatatcgatacccgtaagctgacgcgtttactgcgcgagaaaggcgcacagaatggctgcattatcgcgggcgataacccggatgcggcgctggcgttagaaaaagcccgcgcgttcccaggtctgaatggcatggatctggcaaaagaagtgaccaccgcagaagcctatagctggacacaagggagctggacgttgaccggtggcctgccagaagcgaaaaaagaagacgagctgccgttccacgtcgtggcttatgattttggtgccaagcgcaacatcctgcggatgctggtggatagaggctgtcgcctgaccatcgttccggcgcaaacttctgcggaagatgtgctgaaaatgaatccagacggcatcttcctctccaacggtcctggcgacccggccccgtgcgattacgccattaccgccatccagaaattcctcgaaaccgatattccggtattcggcatctgtctcggtcatcagctgctggcgctggcgagcggtgcgaagactgtcaaaatgaaatttggtcaccacggcggcaaccatccggttaaagatgtggagaaaaacgtggtaatgatcaccgcccagaaccacggttttgcggtggacgaagcaacattacctgcaaacctgcgtgtcacgcataaatccctgttcgacggtacgttacagggcattcatcgcaccgataaaccggcattcagcttccaggggcaccctgaagccagccctggtccacacgacgccgcgccgttgttcgaccactttatcgagttaattgagcagtaccgtaaaaccgctaagtaatcaggagtaaaagagccatgccaaaacgtacagatataaaaagtatcctgattctgggtgcgggcccgattgttatcggtcaggcgtgtgagtttgactactctggcgcgcaagcgtgtaaagccctgcgtgaagagggttaccgcgtcattctggtgaactccaacccggcgaccatcatgaccgacccggaaatggctgatgcaacctacatcgagccgattcactgggaagttgtacgcaagattattgaaaaagagcgcccggacgcggtgctgccaacgatgggcggtcagacggcgctgaactgcgcgctggagctggaacgtcagggcgtgttggaagagttcggtgtcaccatgattggtgccactgccgatgcgattgataaagcagaagaccgccgtcgtttcgacgtagcgatgaagaaaattggtctggaaaccgcgcgttccggtatcgcacacacgatggaagaagcgctggcggttgccgctgacgtgggcttcccgtgcattattcgcccatcctttaccatgggcggtagcggcggcggtatcgcttataaccgtgaagagtttgaagaaatttgcgcccgcggtctggatctctctccgaccaaagagttgctgattgatgagtcgctgatcggctggaaagagtacgagatggaagtggtgcgtgataaaaacgacaactgcatcatcgtctgctctatcgaaaacttcgatgcgatgggcatccacaccggtgactccatcactgtcgcgccagcccaaacgctgaccgacaaagaatatcaaatcatgcgtaacgcctcgatggcggtgctgcgtgaaatcggcgttgaaaccggtggttccaacgttcagtttgcggtgaacccgaaaaacggtcgtctgattgttatcgaaatgaacccacgcgtgtcccgttcttcggcgctggcgtcgaaagcgaccggtttcccgattgctaaagtggcggcgaaactggcggtgggttacaccctcgacgaactgatgaacgacatcactggcggacgtactccggcctccttcgagccgtccatcgactatgtggttactaaaattcctcgcttcaacttcgaaaaattcgccggtgctaacgaccgtctgaccactcagatgaaatcggttggcgaagtgatggcgattggtcgcacgcagcaggaatccctgcaaaaagcgctgcgcggcctggaagtcggtgcgactggattcgacccgaaagtgagcctggatgacccggaagcgttaaccaaaatccgtcgcgaactgaaagacgcaggcgcagatcgtatctggtacatcgccgatgcgttccgtgcgggcctgtctgtggacggcgtcttcaacctgaccaacattgaccgctggttcctggtacagattgaagagctggtgcgtctggaagagaaagtggcggaagtgggcatcactggcctgaacgctgacttcctgcgccagctgaaacgcaaaggctttgccgatgcgcgcttggcaaaactggcgggcgtacgcgaagcggaaatccgtaagctgcgtgaccagtatgacctgcacccggtttataagcgcgtggatacctgtgcggcagagttcgccaccgacaccgcttacatgtactccacttatgaagaagagtgcgaagcgaatccgtctaccgaccgtgaaaaaatcatggtgcttggcggcggcccgaaccgtatcggtcagggtatcgaattcgactactgttgcgtacacgcctcgctggcgctgcgcgaagacggttacgaaaccattatggttaactgtaacccggaaaccgtctccaccgactacgacacttccgaccgcctctacttcgagccggtaactctggaagatgtgctggaaatcgtgcgtatcgagaagccgaaaggcgttatcgtccagtacggcggtcagaccccgctgaaactggcgcgcgcgctggaagctgctggcgtaccggttatcggcaccagcccggatgctatcgaccgtgcagaagaccgtgaacgcttccagcatgcggttgagcgtctgaaactgaaacaaccggcgaacgccaccgttaccgctattgaaatggcggtagagaaggcgaaagagattggctacccgctggtggtacgtccgtcttacgttctcggcggtcgggcgatggaaatcgtctatgacgaagctgacctgcgtcgctacttccagacggcggtcagcgtgtctaacgatgcgccagtgttgctggaccacttcctcgatgacgcggtagaagttgacgtggatgccatctgcgacggcgaaatggtgctgattggcggcatcatggagcatattgagcaggcgggcgtgcactccggtgactccgcatgttctctgccagcctacaccttaagtcaggaaattcaggatgtgatgcgccagcaggtgcagaaactggccttcgaattgcaggtgcgcggcctgatgaacgtgcagtttgcggtgaaaaacaacgaagtctacctgattgaagttaacccgcgtgcggcgcgtaccgttccgttcgtctccaaagccaccggcgtaccgctggcaaaagtggcggcgcgcgtgatggctggcaaatcgctggctgagcagggcgtaaccaaagaagttatcccgccgtactactcggtgaaagaagtggtgctgccgttcaataaattcccgggcgttgacccgctgttagggccagaaatgcgctctaccggggaagtcatgggcgtgggccgcaccttcgctgaagcgtttgccaaagcgcagctgggcagcaactccaccatgaagaaacacggtcgtgcgctgctttccgtgcgcgaaggcgataaagaacgcgtggtggacctggcggcaaaactgctgaaacagggcttcgagctggatgcgacccacggcacggcgattgtgctgggcgaagcaggtatcaacccgcgtctggtaaacaaggtgcatgaaggccgtccgcacattcaggaccgtatcaagaatggcgaatatacctacatcatcaacaccacctcaggccgtcgtgcgattgaagactcccgcgtgattcgtcgcagtgcgctgcaatataaagtgcattacgacaccaccctgaacggcggctttgccaccgcgatggcgctgaatgccgatgcgactgaaaaagtaatttcggtgcaggaaatgcacgcacagatcaaataatagcgtgtcatggcagatatttttcatccgctaatttgatcgaataactaatacggttctctgatgaggaccgtttttttttgcccattaagtaaatcttttggggaatcgatatttttgatgacataagcaggatttagctcacacttatcgacggtgaagttgcatactatcgatatatccacaattttaatatggccttgtttaattgcttcaaaacgagtcatagccagacttttaatttgtgaaactggagttcgtatgtgtgaaggatatgttgaaaaaccactctacttgttaatcgccgaatggatgatggctgaaaatcggtgggtgatagcaagagagatctctattcatttcgatattgaacacagcaaggcggttaataccctgacttatattctgtcggaagtcacagaaataagctgcgaagttaagatgatccctaataagctggaagggcggggatgccagtgtcagcgactggttaaagtggtcgatatcgatgagcaaatttacgcgcgcctgcgcaataacagtcgggaaaaattagtcggtgtaagaaagacgccgcgtattcctgccgttccgctcacggaacttaaccgcgagcagaagtggcagatgatgttgtcaaagagtatgcgtcgttaattttatctcgttgataccgggcgtcctgcttgccagatgcgatgttgtagcatcttatccagcaaccaggtcgcatccggcaagatcaccgtttaggcgtcacatccgtcgtcccctgcaaacgggggcgattttcctccatttgcctcagtggctgcgtttcatgtaacgatacatgacagcgcccgacaagatcctgatactctttggtattcaaccgtttccagtgtaactcgtcgtcactaacattgcgtacagcgcgggctggcgtacccatcaacaactggcgtttctcgccgcgaaagcccgctttgacaaagctcatggcggcaacaatgctctcttcgccaatgaccgcgccatccataatcacgctgttcatcccgaccaatgcatcgcgaccaatcaaacaaccatgcaggatcgctccgtgcccgatatggccgttttccccaacgatagtgtcagtgtcgcagtagccatgcataatgcagccatcctgaatattggctcccgcttgcacgatcaaccgcccgtagtcaccacgcagtgaggcgagtgggccgatgtagacaccggctcccacaatcacatcgccaatcaagacggcactgggatggacaaacgccgtcgggtgaaccaccggaattaacccctcaaaggcgtaatagctcacggttgttaacgtcctttccacaccggatcgcgcttctcggcaaacgccagcggcccttcaatggcatcttccgaatgcagaaccgatggatagtgtttcaacacgccgctgcgaatatagcgatacgcttcttctaccggcatttcgctggtggtgcggtagatctctttcagcgccgcaatcgccagcggggcgctgttaaccagctgctgagccagttcgcgggcgttatccatcagttccgcctggctaaccacgcggttgactatcccccaacgcagcgcctcttctgcgcccattcgtctgccggtcatcaccatttcattgacgatggcaggcggcaggatcttcggcagacgcagcacaccgccgctgtcaggaacgatgcccagtttggcttccggcagggcgaagctggcgttatcggcacaaacaataaaatctgccgccagcgccagttcaaagccgccgccaaaggcatagccgttcacagctgcgataaccggtttgtcgagattgaaaatttcggttaatcccgcaaaaccacccggaccaaagtcagcatccggtgcttcgccttctgctgccgcttttaaatcccagcccgcggaaaagaacttctctccggcaccggtaataatggcgacacgtaattgcggatcgtcacggaaatttagaaatacttcgcccatttcaaagctggtttttgcatcaatagcattcgcttttggacgatcaagggtaatttccagaattgatccattgcgggtcagatgtaatgattcactcattccttttctccatttttgctttttcagggacgacaacatccctgcaaaaaatgcatattgttttagagtgtgattattagctggcagggtagttccctgctgtttcatttatttcagattctttctaattattttccccgagcaattacgtggcagatcttttctgatctccagataagagggcactttaaatttcgccatattttgttcgcagaagcggaaaaattcctcttcgctcaatgtttcaccttcattcagcaccacaaatgctttgatggcttcatcgcgaatcgaatctttaatacccacaaccacgatgtcctgaattttcgggtgcgcggcgataatattttccagctccacgcaggagacattctcgccgccacgtttaatcatattgcagcggcgatcgacgaaataaaaaaagtcctcttcgtcgcggtatccggtatcgccggtatgcagccagccatcggcttccagcactttcgcagtggcttgtgggttgagaaagtactctttgaagatggttttcccaggtatgcctttaatgcagatttcaccgatctcaccagccgggagcgggcgattgtgatcgtcgcggatctccgcttcgtagcaaaaccccacccgaccaatcgacggccagcgtcgtttatcgccaggacgatcgccgataatgcccacaatggtttccgtcatcccataagacgtcagcaagcgaacgccgaagcgttcacaaaacgcatctttttcctgctccgacaagttgagataaaacatcacttcccgcaggcggtgttgctgatcgttcgctgaaggcggctgtaccatcaacgtacggatcatcatcggaatacattcggtaacggtggcgcggtacttctgtacctgtccccagaaggcgcgggcgctgtatttctcgaccagcacaaaggtggccccggcagaaaacgccgccatcgccgcagtacactggcaatcgatatgaaacgcaggcattaccgtcaggtagacgtcatcgtcacgcagtgcacactgccaggcggagtaatatccagcgaagcgcaggttgtaatgggtaatcaccacacctttcggtcgggaggtggtgccggaggtgaagagaatttccgccgtatcgtcagtcgatagcggcggtgcatagcacaaggtggcaggttgttgatttttcagttgagtaaacgaactcacgccatcatcagcgggaagtgccacatctgtcaggcaaatgtgccgcaattgagtggcatcttcctgctgaatctgttgatacataggatagaattgcgcactggtcaccagcaggcacgcctggctattttgcaggatccacgcgctttcctcgcacaacaggcgggcgttaatcggcaccataatcgcgccaatttttgccagcccgaaccagcaaaagataaattccgggcagttgtcgagatgtagtgcaaccttgtcgcctttgcgaatccccagcgtataaaacaggtttgccgtgcggttaatctcctgatttaactcaagataactataccggttaacgactccgccgctggattcacaaatcagcgccgttttatgaccgtaaacgtccgcaagatcgtcccacatttgacgtagatgttgtccgccaatgatatccattgcacctctatccatttttgttcgtttgttattgggcgggcgctagtcaggcaagccgactgacgccacgcgtttagtcctcaactttggccagacctttgctgaccaactcctgaatgtcgttttcgctgtagccgatatttttcaaaatggcagccgtgtccatgccatgtgagggcattccgcgccagatttgtccggggttatttttgaatttcggcatgatgttcggccctttgcaggtgcgaccatccatcgtttgccactgagtgattgattcgcgagccacatactgtggattgctttccagttccggtacggtcagcactttggcgcaggcgatattcagttcagcaaagcgttcttttacttccgcgatggtatgtgtcgccagccaggcatcgagtttctcttcaaccagtgggccgtaagggcattcgatacggtggataagctgagtgccttccgggatttctggcgtgccaagcagatgtgcgaggccaatatctttaaagcactcttcaatttgggtaatgcccaccagttccatcacgatgtagccgtcggcacatttatacagaccgcaaccggcgtagtagggatctttacctttgctcatgcgcgggcacatttcgccgccgttgaagtaatccatcatgaagtactggcccatacgcagcatcacttcatacatggcgatgtcgatactttcgcctttaccggtttcacgcactttatgcagtgctgccagcgccgccgtggtggcggtcaggccagaaaagtaatcggcggtatacgggaaggcaggcattggctggtcaacatcaccgttctgaatcaggtaaccactaaaggcctgggcgatagtgttataggccggaagattggtgtactcctcggtgccgtactgaccaaaaccggacaggtgagcgataaccagtttcgggttgtgctgccacagtacttcatcggtaatgccacgacgggcaaaggccggacctttactggcttcgatgaagatatcggtggtttccattaatttcagaaacgcttcgcggccttcatctttgaaaatatttaacgacagcgcgtgcaaattgcggcgggagagttgcgggtagttcggttgaacgcgaatggtgtcggcccaggcgacgttctcgatccagataacttccgcgccccattctgcgaacatttgcccggcaaacggtccggcgatttcgataccggagaagacaacgcgcaatccggccaacggcccgaatttcggcatgggtagatgatccattatttgctcctgaaaaatttatgtagcgcatgactgccggatgcggcgtaaacgctttatccggcctacattcgtgctcccgtaggcctgataagacgcatcagcgtcgcatcaggcagcgcacggacttagcggtattgcttcagcaccgcacgacccagcgtcaggatctgcatttcgtcagatcccccggagacgcggtctacacgcagatcacgccagaagcggctgatgcggtggttgcccgcaatcccgacaccgcccagcacctgcattgcgctatccacaacttcaaatgccgcattggcgcagaagtatttgcacatcgctgcatcgccagaggtgatggtgccgttgtctgctttccacgctgcttcatacagcatgtttttcatggagtttaatttgatcgccatgtgggcgaatttttcctgaatcaactggaaacgaccaatagcctcgccaaactgcacgcgctgattggcgtagcgcgccgcatcttcaaaggcgcacatcgccgtaccgtagttggtgagggctaccaggaaacgttcatggtcgaactcttctttgacgcggttaaagccgttaccttcccgaccgaacatgtctttctcgtccagttccacgtcgtcaaaggtgatttcacagcagctatccatacgcagaccgagcttttcaagtttggtcactttgatgcccggtttgctcatatcaacaaaccattcggtgtagacaggtttgtccggagaagccccgtcgcgcgccatcaccacgatgtacggggtgtaggcgctgctggtaataaaacacttactaccattaagataaatcttaccatttctacgggtataagtcgttttcaggctacccacgtcggagcccgcgcccggttcggtaatcgctgagttccacatctgcttaccggtgccgcggaaagccataattttgtcgatctgctcttgtgtgccttcgcgcaggaaggtgttgaacccgcccggcaactggtacagcacataggttggtgcccccagacgtcccagctccatccacacggcggcgagagtaacaaaccccgcgtccagaccaccgtgctcttcagggatcagcagactgtcgatacccatatccgccagtgctttgacaaaacgttccgggtagacgctgtcacggtcgcactcggcaaaataggcctcccagttttcgctggccatcagttcgcggataccggcgacaaacagttcctgctcatcatttaaattaaaatccatctttcaacctcttgatattttgggggttaattaatctttccagttctgtttcgcgtctttaataaaggagagcgtcaccataatgttgacgaagaacagcgggcatcctccggcgataatggcggtttgaatcggtttcaggccgccgagcgccagcagaacaataccgataatgccaaccagaattgaccaaccgatacgcaccagcagaggtggttcttcaccatcgcgtacttcgcggcaagtggacatcgccagggtataagagcaggcgttaaccagcgtaacggtggcaataaagcagaggatgaagaagccccacatggtggcggtgctgagtggcagagcggcccaggtttcaatgatggcgcgcgccacaccgtactgttcgatcagatttggaatgttgatgatgtttttatctatcaacagcagagtgttactaccgagtacagtccacaggatccaggttgacgctgtcagccccagcaccatgccgaagcacagttcacgcacagtacgaccacgggagatgcgggcgaggaagatactcatctggatagcataaatcacccaccatgcccagtagaacacggtccagccctgcgggaagccgcctttagcgatgggatcggtatagaacaacatgcgcggcagatacatcagcaacatccccaccgaatcggtgaagtagttcatgatgaagctggcaccgctgacaatgaacacccaacccagcatcaggaagctcaggtaactacgcacgtcactggcgatacgtacccctttttgcagaccgcaagcgacgcaaatggcgttgaggataatccagcaggtaatgatgatagcgtccagttgcagggtatgcggaatgccaaacaaccattgcatacactcggtcaccagcggcgtggcaaggcccagactggtacccatcgcgaagatcaaggcgacgagatagaagttgtcgacgatagtgccgaacaaccctttggcgtgtttttcacctaccagcggcaccagtgtcgagctggggcgaatcacttccattttgcggacaaagaagaagtaagcgaaggcgactgaaaggaagctgtaagtggcccacggcagaggtccccagtggaacaagctgtaagccagccccaactctttcgcccctgtcgagttcggttctaagccaaacggcggggtggagatgtagtagtagatctcaatcgatccccagaacagtacggcagcagacgtacaggaggcgaacatcataaagatccaactggcggtgctaaattctggcggttcgttacctaaacgctttttggcatacgggccaaacaccagccagaaccaaccgaaaagcatcaccaccatataccattcaaatgcccatccccatacattggtgacgtaactgaatacagcattaataacgacattcgctgcatccagatctctgactgtaagccaacaaagtatgccgacgattattaacggcggaaagaaaaccttcggttctattcccgtttttctcttttcattcttcatgagttaattccactgtgaaaacgaatatttattttgcgttcccgtttgttttatttttgttaacatttaatataattattattaacctcgtggacgcgttaatggctaactcataatgggtattcaataagctgtattctgtgattggtatcacatttttgtttcgggtgaatagagggcgttttttcgttaattttgattaataatcagtttgttatgctctgttgtgagtaaaaaataacatctgactttcaatattggtgatccataaaacaatattgaaaatttctttttgctacgccgtgttttcaatattggtgaggaacttaacaatattgaaagttggatttatctgcgtgtgacattttcaatattggtgattaaagttttatttcaaaattaaagggcgtgatatctgtaattaacaccaccgatatgaacgacgtttccttcatgatttctggagatgcaatgaagattattacttgctataagtgcgtgcctgatgaacaggatattgcggtcaataatgctgatggttcattagacttcagcaaagccgatgccaaaataagccaatacgatctcaacgctattgaagcggcttgccagctaaagcaacaggcagcagaggcgcaggtgacagccttaagtgtgggcggtaaagccctgaccaacgccaaagggcgtaaagatgtgctatcgcgcggcccggatgaactgattgtggtgattgatgaccagttcgagcaggcactgccgcaacaaacggcgagcgcactggctgcagccgcccagaaagcaggctttgatctgatcctctgtggcgatggttcttccgacctttatgcccagcaggttggtctgctggtgggcgaaatcctcaatattccggcagttaacggcgtcagcaaaattatctccctgacggcagataccctcaccgttgagcgcgaactggaagatgaaaccgaaaccttaagcattccgctgcctgcggttgttgctgtttccactgatatcaactccccacaaattccttcgatgaaagccattctcggcgcggcgaaaaagcccgtccaggtatggtcggcggcggatattggttttaacgcagaggcagcctggtcagaacaacaggttgccgcgccgaaacagcgcgaacgtcagcgcatcgtgattgaaggcgacggcgaagaacagatcgccgcatttgctgaaaatcttcgcaaagtcatttaattacaggggatgctatgaacacgttttctcaagtctgggtattcagcgataccccttctcgtctgccggaactgatgaacggtgcgcaggctttagctaatcaaatcaacacctttgtcctcaatgatgccgacggcgcacaggcaatccagctcggcgctaatcatgtctggaaattaaacggcaaaccggacgatcggatgatcgaagattacgccggtgtcatggctgacactattcgccagcacggcgcagacggcctggtgctgctgccaaacacccgtcgcggcaaattactggcggcaaaactgggttatcgccttaaagcggcggtgtctaacgatgccagcaccgtcagcgtacaggacggtaaagcgacagtgaaacacatggtttacggtggtctggcgattggcgaagaacgcattgccacgccgtatgcggtactgaccatcagcagcggcacgttcgatgcggctcagccagacgcgtcacgcactggcgaaacgcacaccgtggagtggcaggctccggctgtggcgattacccgcacggcaacccaggcgcgccagagcaacagcgtcgatctcgacaaagcccgtctggtggtcagcgtcggtcgcggtattggcagcaaagagaacattgcgctggcagaacagctttgcaaggcgataggtgcggagttggcctgttctcgtccggtggcggaaaacgaaaaatggatggagcacgaacgctatgtcggtatctccaacctgatgctgaaacctgaactgtacctggcggtggggatctccgggcagatccagcacatggttggcgctaacgcgtcgcaaaccattttcgccatcaataaagataaaaatgcgccgatcttccagtacgcggattacggcattgttggcgacgccgtgaagatccttccggcgctgaccgcagctttagcgcgttgatccactctggcagggctgcattttggccctgccgctgacagggagctcttatgtccgaagatatctttgacgccatcatcgtcggtgcagggcttgccggttcggttgccgcactggtgctcgcccgcgaaggtgcgcaagtgttagttatcgagcgtggcaattccgcaggtgccaagaacgtcaccggcgggcgtctctatgcccacagtctggaacacattattcctggtttcgccgactccgcccccgtagaacgcctgatcacccatgaaaaactcgcgtttatgacggaaaagtcagcgatgactatggactactgcaatggtgacgaaacctcgccatcccagcgttcttactccgttttgcgcagtaaatttgatgcctggctgatggagcaggccgaagaagcgggcgcgcagttaattaccgggatccgcgtcgataacctcgtacagcgcgatggcaaagtcgtcggtgtagaagccgatggcgatgtgattgaagcgaaaacggtgatccttgctgatggggtgaactccatccttgccgaaaaattggggatggcaaaacgcgtcaaaccgacggatgtggcggttggcgtgaaggaactgatcgagttaccgaagtcggttattgaagaccgttttcagttgcagggtaatcagggggcggcttgcctgtttgcgggatcacccaccgatggcctgatgggcggcggcttcctttataccaatgaaaacaccctgtcgctggggctggtttgtggtttgcatcatctgcatgacgcgaaaaaatcggtgccgcaaatgctggaagatttcaaacagcatccggccgttgcaccgctgatcgcgggcggcaagctggtggaatattccgctcacgtagtgccggaagcaggcatcaacatgctgccggagttggttggtgacggcgtattgattgccggtgatgccgccggaatgtgtatgaacctcggttttaccattcgcggtatggatctggcgattgccgccggggaagccgcagcaaaaaccgtgctttcagcgatgaaaagcgacgatttcagtaagcaaaaactggcggaatatcgtcagcatcttgagagtggtccgctgcgcgatatgcgtatgtaccagaaactaccggcgttccttgataacccacgcatgtttagcggctacccggagctggcggtgggtgtggcgcgtgacctgttcaccattgatggcagcgcgccggaactgatgcgcaagaaaatcctccgccacggcaagaaagtgggcttcatcaatctaatcaaggatggcatgaaaggagtgaccgttttatgacttctcccgtcaatgtggacgtcaaactgggcgtcaataaattcaatgtcgatgaagagcatccgcacattgttgtgaaggccgatgctgataaacaggcgctggagctgctggtgaaagcgtgccccgcaggtctgtacaagaagcaggatgacggcagtgtgcgcttcgattacgccggatgtctggagtgcggcacctgtcgcattctggggctggggtcggcgctggaacagtgggaatacccgcgcggcacctttggtgtggagttccgttacggctgatgttggtttgatacgtaacgccgcactgactctcattgcaaaaaacaggaataaccatgcaaccgtccagaaactttgacgatctcaaattctcctctattcaccgccgcattttgctgtggggaagcggtggtccgtttctggatggttatgtactggtaatgattggcgtggcgctggagcaactgacgccggcgctgaaactggacgctgactggattggcttgctgggcgcgggaacgctcgccgggctgttcgttggcacatcgctgtttggttatatttccgataaagtcggacggcgcaaaatgttcctcattgatatcatcgccatcggcgtgatatcggtggcgacgatgtttgtttcatcccccgtcgaactgttggtgatgcgggtacttatcggcattgtcatcggtgcagattatcccatcgccacctcaatgatcaccgagttctccagtacccgtcagcgggcgttttccatcagctttattgccgcgatgtggtatgtcggcgcgacctgtgccgatctggtcggctactggctttatgatgtggaaggcggctggcgctggatgctgggtagcgcggcgatcccctgtttgttgattttgattggtcgattcgaactgcctgaatctccccgctggttattacgcaaagggcgagtaaaagagtgcgaagagatgatgatcaaactgtttggcgaaccggtggctttcgatgaagagcagccgcagcaaacccgttttcgcgatctgtttaatcgccgccattttccttttgttctgtttgttgccgccatctggacctgccaggtgatcccaatgttcgccatttacacctttggcccgcaaatcgttggtttgttgggattgggggttggcaaaaacgcggcactagggaatgtggtgattagcctgttctttatgctcggctgtattccgccgatgctgtggttaaacactgccggacggcgtccattgttgattggcagctttgccatgatgacgctggcgctggcggttttggggctaatcccggatatggggatctggctggtagtgatggcctttgcggtgtatgcctttttctctggcgggccgggtaatttgcagtggctctatcctaatgaactcttcccgacagatatccgcgcctctgccgtgggcgtgattatgtccttaagtcgtattggcaccattgtttcgacctgggcactaccgatctttatcaataattacggtatcagtaacacgatgctaatgggggcgggtatctcgctgtttggcttgttgatttccgtagcgtttgccccggagactcgagggatgtcactggcgcagaccagcaatatgacgatccgcgggcagagaatggggtaaattgttcagatttctctcttttctgaatcaatattattgactataagccgcgtgaatatatgactacactttgtgggaaaacaaaggcgtaatcacgcgggctacctatgattcttataatttatgcgcatccgtatccgcatcattcccatgcgaataaacggatgcttgaacaggcaaggacgctggaaggcgtcgaaattcgctctctttatcaactctatcctgacttcaatatcgatattgccgccgagcaggaggcgctgtctcgcgccgatctgatcgtctggcagcatccgatgcagtggtacagcattcctccgctcctcaaactttggatcgataaagttttctcccacggctgggcttacggtcatggcggcacggcgctgcatggcaaacatttgctgtgggcggtgacgaccggcggcggggaaagccattttgaaattggtgcgcatccgggctttgatgtgctgtcgcagccgctacaggcgacggcaatctactgcgggctgaactggctgccaccgtttgccatgcactgcacctttatttgtgacgacgaaaccctcgaagggcaggcgcgtcactataagcaacgtctgctggaatggcaggaggcccatcatggatagccatacgctgattcaggcgctgatttatctcggttcggcagcgctgattgtacccattgcggtacgtcttggtctgggatcggtacttggctacctgatcgccggctgcattattggcccgtgggggctgcgactggtgaccgatgccgaatctattctgcactttgccgagattggggtggtgctgatgctgtttattatcggcctcgaactcgatccacaaaggctgtggaagctgcgtgcggcagtgttcggctgtggcgcattgcagatggtgatttgcggcggcctgctggggctgttctgcatgttacttgggctgcgctggcaggtcgcggaattgatcggcatgacgctggcgctctcctctacggcgattgccatgcaggcgatgaatgaacgcaatctgatggtgacgcaaatgggtcgcagtgcctttgcggtgctgctgttccaggatatcgcggcgatcccgctggtggcgatgattccgctactggcaacgagcagtgcctcgacgacgatgggcgcatttgctctctcggcgttaaaagtggcgggtgcgctggtgctggtggtattgctggggcgctatgtcacgcgtccggcgctgcgttttgtagcccgctctggcttgcgggaagtgtttagtgccgtggcgttattcctcgtgtttggctttggtttgctgctggaagaggtcggcttgtcgatggcgatgggcgcgtttctggcgggcgtactgctggcaagctcggaataccgtcatgcgctggagagcgatatcgaaccatttaaaggtttgctgttggggctgtttttcatcggtgttggcatgtcgatagactttggcacgctgcttgaaaacccattgcgcattgtcattttgctgctcggtttcctcatcatcaaaatcgccatgctgtggctgattgcccgaccgttgcaagtgccaaataaacagcgtcgttggtttgcggtgttgttagggcagggcagtgagtttgcctttgtggtatttggcgcggcgcagatggcgaatgtgctggagccggagtgggcgaaatcgctgaccctggcggtggcgctgtcgatggcagcaacgccgattctgctggtgatcctcaatcgccttgagcaatcttctactgaggaagcgcgtgaagccgatgagatcgacgaagaacagccgcgcgtgattatcgccggattcggtcgttttgggcagattaccggacgtttactgctctccagcggggtgaaaatggtggtactcgatcacgatccggaccatatcgaaaccttgcgtaaatttggtatgaaagtgttttatggcgatgccacgcggatggatttactggaatctgccggagcggcgaaagcggaagtgctgattaacgccatcgacgatccgcaaaccaacctgcaactgacagagatggtgaaagaacatttcccgcatttgcagattattgcccgcgcccgcgatgtcgaccactacattcgtttgcgtcaggcaggcgttgaaaagccggagcgtgaaaccttcgaaggtgcgctgaaaaccgggcgtctggcactggaaagtttaggtctggggccgtatgaagcgcgagaacgtgccgatgtgttccgccgctttaatattcagatggtggaagagatggcaatggttgagaacgacaccaaagcccgcgcggcggtctataaacgcaccagcgcgatgttaagtgagatcattaccgaggaccgcgaacatctgtcattaattcaacgacatggctggcagggaaccgaagaaggtaaacataccggcaacatggcggatgaaccggaaacgaaaccctcatcctaataaagagtgacgtaaatcacactttacagctaactgtttgtttttgtttcattgtaatgcggcgagtccagggagagagcgtggactcgccagcagaatataaaattttcctcaacatcatcctcgcaccagtcgacgacggtttacgctttacgtatagtggcgacaattttttttatcgggaaatctcaatgatcagtctgattgcggcgttagcggtagatcgcgttatcggcatggaaaacgccatgccgtggaacctgcctgccgatctcgcctggtttaaacgcaacaccttaaataaacccgtgattatgggccgccatacctgggaatcaatcggtcgtccgttgccaggacgcaaaaatattatcctcagcagtcaaccgggtacggacgatcgcgtaacgtgggtgaagtcggtggatgaagccatcgcggcgtgtggtgacgtaccagaaatcatggtgattggcggcggtcgcgtttatgaacagttcttgccaaaagcgcaaaaactgtatctgacgcatatcgacgcagaagtggaaggcgacacccatttcccggattacgagccggatgactgggaatcggtattcagcgaattccacgatgctgatgcgcagaactctcacagctattgctttgagattctggagcggcggtaattttgtatagaatttacggctagcgccggatgcgacgccggtcgcgtcttatccggccttcctatatcaggctgtgtttaagacgccgccgcttcgcccaaatccttatgccggttcgacggctggacaaaatactgtttatcttcccagcgcaggcaggttaatgtaccaccccagcagcagccggtatccagcgcgtatataccttccggcgtacctttgccctccagcgatgcccagtgaccaaaggcgatgctgtattcttcagcgacagggccaggaatcgcaaaccacggtttcagtggggcaggggcctcttccggcgattctttgctgtacatatccagttgaccgttcgggaagcaaaaacgcatacgggtaaaagcgttggtgataaaacgcagtcttcccagcccccgcaattccggtgaccagttatttggcatatcgccgtacatggcatcaagaaagaagggataggagtcactcgatagcaccgcttctacatcgcgtgcgcactctttggcggtctgcagatcccactgcggcgtgatccctgcgtgggccatcaccagctttttctcttcgtcgatttgcagcagaggctggcgccgcagccagttaagcagctcgtcggcatccggcgcttccagcagcggtgtcaggcgatctttcggtttattgcggctgatcccggcaaataccgccagcagatgcagatcgtgattgcccagcaccagacgtacgctgtcgcctaaggatttcacatagcgcagaacatccagcgaacccggcccgcgcgcgaccagatcgcccgtcagccagagggtatctttcccaggggtaaattctactttatgcagcaatgcgatcagttcatcgtaacaaccatgaacgtcgccaataaggtatgtcgccatattcttttaatgaatgagtgtgggaacggcgagtcggaatacgggaatgtcgatgctgaaagggacgccattttcatcgatcatttcgtagtgaccctgcatggtgcccagcggggtttcaatgattgcaccgctggtgtactggtactcttcgccaggcgcgataagtggctggacgccaaccactccttcgccctggacttcggtttcacggccattgccattggtgatcagccagtaacgccccaacaactgcactggcgctcgccccagattgcgtatggttacggtataagcaaaaacgtaacgttcattatcaggtgaagattgagcctcaatgtagacgctttgaacctgaatacacactcggggcgaattgatcatcgttaactctcctgcaaaggcgcgttctccgccagatagttcgccatctggcaatattgcgcgacagagatattttccgctcgcatcgccgggtcgatccccattcccgttaacacctcgacgctaaacaggttgccgaggctgttacgaatggttttacgacgctggttaaaggcttcggtggtgatgcggctcaacacacgaacatctttaaccgggtgaggcatcgttgcatgaggaaccaggcgcacgacggcggaatccactttgggtggtggtgtaaaggctgacggcggtacttccagtaccgggatcacattgcaatagtattgcgccatgacgcttaatcgaccatacgctttgctgttcggtcctgcaaccagacgattcaccacctctttttgcaacataaagtgcatgtcggcaatggcatcagtatagctaaacagatggaacatcaacggcgtggagatgttataaggcaggttgccgaaaacacgcagcggctgacccattttctcggccagttcaccaaagttaaaggtcatcgcatcctgctgataaatcgtcagtttcgggcctaagaatggatgcgtttgcagacgtgccgccagatcgcggtcaagttcgatgaccgtcagctggtccagacgttcgccgaccggttcggtcaatgccgccagaccggggccgatttcgaccatcgcctggcccttttgcgggttaatggcagacacaatactgtcgatcacgaactgatcgttgagaaagttttgcccgaagcgtttacgggctaagtggccctggtggactcgattattcattgggtgttaacaatcattttgatggcgagattaagcgccgtaataaaactgccgacatcggctttgccacgtcccgccagttcaagcgcggtgccgtggtccactgatgtgcgaataaagggcaggcccagcgtaatgttcacaccgcgcccgaagccctggtattttagcacgggaagaccctgatcgtggtacatcgccagcacggcgtcggcgttatcaagatatttcggctgaaacagggtatcggcaggcagcggcccgttgagtttcatcccctgcgcccgcagctcattgagcaccggaataatggtgtctatctcttccgtacccatatgaccgccttcgcccgcgtgcggattcagcccgcagaccagaatgcgcggttcggcaataccaaatttggtccgcaaatcgtgatgcaaaatagcaatcacttcgtgcaaaagtgcaggggtgatagcgtctgcgatatcgcgcagcggtaaatgcgtcgttgccagcgccacgcgaagttcttcggtcgccagcatcatcaccacctttttcgcctgcgaacgctcttcgaaaaactcggtatgaccggtaaaaggaatgccagcgtcgttaataacgcctttatgcaccggacctgtgatcagcgcggcaaattcgccgttcagacaaccatcgcacgctcgcgccagcgtttccaccacataatgcccattttcaaccgctaactgccccgcagtgacaggtgcacgtagcgcgacaggaagtagcgttaatgtgcccgcagtttgcggttgtgcaggggagttgggggaataagggcggagggtgagcggcaaaccgagcatcgctgcccggttggtaaggagagtggcatcggcacaaacaaccagttcgaccggccactcacgctgtgcaagctggacaactaagtccgggccaatcccggcgggctcgccgggagtgatcacaacacgttgggttttaaccattagttgctcaggattttaacgtaggcgctggcacgttgttcctgcatccagcttgctgcttcttccgagaacttacggttcatcagcatgcggtatgcacgatctttctgcgcagcgtcggttttatcgacattacgggtatccagcagttcgattaaatgccagccgaatgaagagtgaaccggtgcactcatttgacctttgttcaggcgagtcagggcgtcacggaaggccggatcgaaaatatctggtgtagcccagccgagatcgccgccctggttagcagagcctggatcctgagagaactctttcgctgcggcagcaaaagtcgttttaccactcttgatatcagcagcaatctgttccagtttcacacgggcctgttcgtcagtcatgatcggcgacggtttcagcagaatatggcgagcatgaacttcggtcaccgagatatttttgctttcgccgcgcaggtcgttaactttcagaatatggaagccaacgccggaacgaatcgggccaacaatgtcgcctttcttcgcggtgcttaatgcctgggcgaagatcccgggcaactcctgaatacggccccagcccatctggccgccgttcagcgcctgctggtcggcagaatgagcaatcgccagcttaccgaaatcagcgccgttacgcgcctgatcgacaatggcgcgcgcctggctttccgcttcgttcacctgatcagaggtcgggttttccggcagcgggatcaggatgtggctcaggttcagctcagtgctggcgtcgttttggttacccacctgctgcgccagggattcgacttcctgcggcaggatggtgatgcgacgacgcacctcgttgttacgcacttcagagataatcatctctttgcggatctggttacgataggtgttgtagttcagtccatcgtaagccagacggctgcgcatctgatccagcgtcatgttgttctgtttcgcgatgttagcaatcgcctgatccagctgctcatcggagattttcactcccattttctgccccatctgcaggatgatttgatccatgatcaaacgttccatgatttggtggcgcagcgtcgcgtcatcaggaagttgctgccttgcctgagcagcgttcagttttaccgactgcattaatccatcaacgtcgctttccagcacgacgccgttattgacgacggctgcgactttatcgactacctggggggcagcgaaactggtattcgcgatcatggcgataccgagaagcagcgttttccagttcttcatactttttccatttcaattaaccgcactgcggattacgtggtaaatcaacaaatcacaaagtgttttgatacggcagaatgttcgaacgcagcatctcttgcgtacccagaccgtagttggagctcaggccgcgaagttcgatgttaaagccgattgcgttgtcatataccgcatgttgtttatcgttatcccaaccgttcagcttccgctcgtaaccgacgcgaattgcatagcagcaggagctgtattgcacacctaacatagagtcggcttgcttgttagcattggtgtcgtagtagtaggccccaacaatggaccaacgatcggcaattggccagctggcgacagcacctacctgcgaaataccattcttatattgctcagcagtggaatagtacttaggcagcgtagcctgaatatattccgggctggcgtaacggtaattcagctgtaccagacggtcttcatcccgacggtattcaatgctggagttactggtcgctacgttatccagacgtgtatcgtactgaatcccgccacgcaatccccaacgctcggagatacgccagtaagtatcgcctgcccacaccagtgaacccgttttgtcgtcattctcccatgttatgttgtcatcgccagtgcgagactccgtgaaatagtagatttgaccaacggaaatattaaaacgttcaacggcagcatcatcatatatgcgagatgtgacaccggtcgtcacctggttagcggaggcaatacggtcaagaccgccgtaagtccggtcccggaacaggccagagtagtcagattgcagcagagacgagtcgtagttatagatgtcgctctgatcgcgatacggcacgtacaaatactgcgcgcgcggttccagcgtttgggtataacccggagccagcatttccatatcgcgttcaaagaccattttgccgtcaactttgaattgcggcattacgcggttaacggattcgtccagcttggtcgtgtttctggagttataccagtcaagattggtttgctgataatgggttgccagcaacttcgcttcggtattgatgctgccccagttattagagagcggcaaattgatggtcggttccaggtgaacacgggttgcttcaggcatgtcgtctctggtgttaacaaagtgcactgcctggccgtaaatacgcgtatcaaacggaccaacatcattctggtagtaattaacgtctaactgcggctctgccgagtagctactggtgttctgttcgctgaaaacctggaactgcttggttgaaacggtggcattgaagttttgcaccgcatagccaacgctgaatttttgcgttgcgtagccgtcagtactggaaccgtacttgttatcgaaatcattgaagtagctaggatcgctgaccttggtgtagtcgacgttgaaacgccacacctgatccatgaccccggagtggttccagtagaataaccaacgacgtgaactgtcatcgttcgggtgttcatcttcatagactttatctgaaggcagatagtccagttccatcaagccagcgcccgcctgggagaggtagcggaattcgttctcccacatgatgttgccacgacgatgcatataatgcggcgtgatggtggcatccatatttggcgcgatgttccagtaatatggcaggtagaactcaaagtagttggtggtggtgtacttggcgttcgggatcaagaaaccagagcgacgtttgtcacccaccggcaactgcaaataggggctataaaagatcggtaccggacccaccttaaagcgggcgttccagatctccgcaacttgttcttcgcggtcatgaataatttcgctacctaccacgctccaggtgtcagaacccggcagacaggaggtaaagctaccgttatccagaatggtatagcggttttcgccacgttgtttcatcaggtccgctttaccgcgaccctggcgacccaccatctggtaatcaccttcccagacgttggtatctttggtgttcagattcgcccagcctttcggccctttgaggatcacctggttatcgtcgtaatggacattaccgagcgcatcaacggtacgtaccggctccggttgtcctggtgcctctttttgatggagctgcacttcgtcggcctgcagacggctgttaccctgcatgatatccacgctgccagtaaacacggcgtcatccgggtagtcccctttcgcgtggtcagcattgatagtcacgggtaagtcattggtatcgccctgtaccagaggacggtcatagcttggcacgcccaacatgcactgtgaggcgaggtcggctgccagtccctgttgactataaagggcggtggcaatcatggtggccaggagagtggggatacgttttttcatacgttgattttattgttccatcatcggtaacgttgcgcgtgacaaacggtcagagactaacgtactcgtcatctctacgctagtgttaatcctgtccgaatagcgtcagtggtgttaggcacggcattgaatgacaggtatgataatgcaaattataggcgatgtcccacaattgaccgcagccggaaaacggtaaaagcacctttatattgtgggagatagccctgatatccgtgtgtcgatttggggaatatatgcagtattggggaaaaatcattggcgtggccgtggccttactgatgggcggcggcttttggggcgtagtgttaggcctgttaattggccatatgtttgataaagcccgtagccgtaaaatggcgtggttcgccaaccagcgtgagcgtcaggcgctgttttttgccaccacttttgaagtgatggggcatttaaccaaatccaaaggtcgcgtcacggaggctgatattcatatcgccagccagttgatggaccgaatgaatcttcatggcgcttcccgtactgcggcgcaaaatgcgttccgggtgggaaaatcagacaattacccgctgcgcgaaaagatgcgccagtttcgcagtgtctgctttggtcgttttgacttaattcgtatgtttctggagatccagattcaggcggcgtttgctgatggttcactgcacccgaatgaacgggcggtgctgtatgtcattgcagaagaattagggatctcccgcgctcagtttgaccagtttttgcgcatgatgcagggcggtgcacagtttggcggcggttatcagcagcaaactggcggtggtaactggcagcaagcgcagcgtggcccaacgctggaagatgcctgtaatgtgctgggcgtgaagccgacggatgatgcgaccaccatcaaacgtgcctaccgtaagctgatgagtgaacaccatcccgataagctggtggcgaaaggtttgccgcctgagatgatggagatggcgaagcagaaagcgcaggaaattcagcaggcatatgagctgataaagcagcagaaagggtttaaatgaccctgtaaatgatgctgagtaactgcccacgattaaaggtggccgccctggcggtcacttctttgagaaaaggcgtttactcagaatggtggacaggctcaatgcacggtttacgggaggggttctgtaggttttatcgcgttgaccctgcttaaggttgagagctttacgacgagcggaattatatttttacgtcttaaaaataaaaaacacatacctgaatgagcgatttttgaaagtatatttattcagaacgcgcatcatgagtttttaactcaatgcgaggctattaccatgaaagtatcagttccaggcatgccggttacacttttaaatatgagcaagaacgatatttataagatggtgagcggggacaagatggacgtgaagatgaatatctttcaacgcttgtgggagacgttacgccatctgttctggtcagataaacagactgaggcttataaacttctgttcaatttcgtgaataaccagactggcaacatcaacgcctcagaatactttactggggctatcaacgagaatgagagagaaaagtttatcaatagcctggaattattcaataaacttaaaacatgcgcaaaaaatccggatgagttggtcgcaaagggcaatatgcgctgggtcgcccagaccttcggggatatcgagttaagtgtcacttttttcattgaaaagaataagatatgtactcagacgttgcagctgcataagggccaaggtaacttgggcgttgatcttagaaaggcttaccttcccggcgttgacatgagggattgttaccttggtaaaaaaacaatgaaaggtagcaatgatatcctttatgagagacctgggtggaatgctaacctgggcgtgctaccccggacggtgctaccccggacggtgctaacccggacggtgctaacctggacggtgctaccgtgaacggtgctacctccttatatgatgaggtaattattattaataaaatcccccccaaaaaaattgatactaaaggagttgctactgaagaagttgctactaaaaaagtactgctgaacaaattactgacaacgcaattattgaatgagccagaataagctaaggttgaaggggctggaacgccccttcaaccttagcagtagcgtgggatgatttcacaattagaaagacctgcatgatgagctagagaagaggctagtgacgcaaggcgtcgtgcaggacacggatcaccgagatgggcatcgccaaccagactgctaattagcccatgaataacaatcagaaaggaccataacagacccgttaaaatgaaatataagagacggtcaacgggtgaagaaaaagttcaaaaattcgctgtggagcaggaagggaattaccgaatggaaagcgtagccacacgcaacaactgaaagcagtttggcagaaacaaaaaatccccggactcggggatttatgtacaagaggcagcccttaggatgagggtataaacgtacaggaaaggttaaaaatccgctggcgctttaaacgtcatactattgccatacgccggatgggtaatcgtcaacatctctgcatgtagcaacaaacgtggtgccatcgctctcgcttctggtgatgcataaaaacgatcgccgagaatcggatgacccagcgccagcatatgcacacgcaattgatgcgaacgcccggtaatcggttttaacaccactcttgccgtgttatccgccgcatactccaccacttcatattccgtctgcgcaggtttacccgtttcgtaacagactttctgtttcgggcggtttggccagtcgcaaatcagcggcagatccaccagaccttctgcgggggatggatgcccccagacgcgggccacatactgctttttcggctcgcgctcgcggaactggcgttttaactcccgctccgcggctttggtcagcgccactacaatcacgccgctggtagccatatccagacgatgcaccgattctgcctgcggataatcacgctgaatgcgcgtcatcacgctgtctttgtgctcttccagacgacccggcactgacaacaaaccgctcggcttgttgaccaccataatatggtcatcctgatacaggataaccaaccagggttcctgcggtggattgtagttttccatccccattttcggctccgttactgatgcgttacaacgatcaaacgcagggcatccagacgccaacctgcctgatccaggctttccattacctgctgacggttgctctcaatggcggtcagttcgtcgtcacgaatgttcgggttcactgcacgcagagcttccagacgagacagctcggcagacagtttttcgtcggcttcgttacgcgctgcatcaatcaatgcacgggcagatttctcgatctgcgcttcacccagttgaaggatagcgtgaacatcctgctgcacggcgttaaccagtttgctgccggtgtgacggttaaccgcgttaagctggcggttaaaggtttcaaactctacctgcgccgccaggttgttgccgtttttatccagcagcatacgtaccggcgtcggtggcaggaagcggttgagctgcaactgcttcggagcctgggcttcaaccacataaatcagttccaccaacagcgtacctaccggcaacgctttgttttttaacagtgaaatcgtgctgctaccggtatcgccagaaaggatcagatccagaccgttgcggatcagcggatgctcccaggtaataaactgtgcatcttcacgcgccagcgccacttcacgatcaaaggtgatggtgatgccatcttccgacaggccagggaagtccggcaccagcatatgatcggacggcgtcagcacgatcatgttgtcgccgcgatcgtcctgattgataccgataatatcgaacaggttcatggcgaaggcgatcaggttggtatcgtcatcctgctcttcaatgctttctgccagtgcctgggctttttcgccaccgttggagtggatttccagcaggcggtcacgaccctgttccagctgtgctttcagcgcttcatgttgctcgcggcagtttttgatcagatcgtcaaagccttcggtttgatccggtgaagccagatagttaatcagatcgttgtatacgctatcgtaaatagtgcgtccggtcgggcaggtgtgctcaaatgcatccagaccttcgtgataccagcgcaccagcaccgactgagcggttttctccagataaggcacatggatctgaatatcgtgcgcctggccgatacgatccagacgaccaatacgctgctccagtagatccgggttgaatggcaggtcaaacatcaccatgtggctggcgaactggaagttacgtccttcagaaccgatttctgagcacagcagtacctgtgcgccggtgtcttcttcggcaaaccaggcggcagcgcggtcacgttcgataatcgacataccttcgtggaacaccgcagcgcgaataccttcacgttcgcgcagtacctgctccagttgcagcgcagtggcagctttggcgcagatcaccagcactttctgagagcgatggctggtcaggtagcccatcagccactcaacgcgcggatcgaagttccaccaggtggcgttatcaccttcaaattcctgataaatacgctccgggtagagcatatcgcgagcacgatcttccgcacttttacgtgcgcccataatgccggagactttaatagccgtctgatactgcgtcggtagcggcagcttaatggtgtgcagctcgcgtttcgggaatcctttcacaccgttacgcgtgttacggaacagcacgcggctggtgccgtggcgatccatcagcatcgaaaccagctcctgacgggcgctctgggcatcttcgctgtcgctgtttgctgcctgcaacagcggctcgatatcctgctcgccgatcatctcgccgagcatgttcagttcgtcattgctcagtttgttacctgccagcagcatggcaacggcgtccgcaaccggacgataatttttctgctcttcaacgaactgcgcaaaatcgtggaaacggttcgggtccagcagacgcagacgggcgaagtggctttccatccccagctgttccggggtcgcggtcagcagcagaacgcccggcacgtgctctgccagttgttcaatggcctgatttgaacgccaggcgcggcaacggggttatcaactgctgattgcctgctcagaagatcagccagacaacgaaatgcggtgcattgagcaccttttacagcgtcaggttgatgccattattgtttcgacgtcgttgcctcctgagcatcctttttatcaacgctgggctaacgacccgttcccgattgtcgcgctggaccgcgccctcgatcgtgaacacttcaccagcgtggttggtgccgatcaggatgatgccgaaatgctggcggaagagttacgtaagtttcccgccgagacggtgctttatcttggtgcgctaccggagctttctgtcagcttcctgcgtgaacaaggtttccgtactgcctggaaagatgatccgcgcgaagtgcatttcctgtatgccaacagctatgagcgggaggcggctgcccagttattcgaaaaatggctggaaacgcatccgatgccgcaggcgctgttcacaacgtcgtttgcgttgttgcaaggagtgatggatgtcacgctgcgtcgcgacggcaaactgccttctgacctggcaattgccacctttggcgataacgaactgctcgacttcttacagtgtccggtgctggcagtggctcaacgtcaccgcgatgtcgcagagcgtgtgctggagattgtcctggcaagcctggacgaaccgcgtaagccaaaacctggtttaacgcgcattaaacgtaatctctatcgccgcggcgtgctcagccgtagctaagccgcgaacaaaaatacgcgccaggtgaatttccctctggcgcgtagagtacgggaatggacatcaatatccttaaagtaaataagactattcctgactattattgataagttcttttaaacccgcccgttaattaactcaccagctgaaattcacaataattaagtgatatcgacagcgcgtttttgcattattttgttacatgcagagatgaattgccgatttaacaagcacttttctttgcttttgcgcaaacccgctggcatcaagcgccacacagacgcaacagggactgttaaccggggaagatatgtcctaaaatgccgctcgcgtcgcaaactgacactttatatttgctgtggaaaatagtgagtcattttaaaacggtgatgacgatgagggattttttcttacagctattcataacgttaatttgctgcgcacgttggacgtaaaataaacaacgctgatattagccgtaaacatcgggttttttacctcggtatgccttgtgactggcttgacaagcttttcctccgctccgtaaactcctttcagtgggaaattgtggggcaaagtgggaataaggggtgaggctggcatgttccggggagcaacgttagtcaatctcgacagcaaagggcgcttatcagtgcctacccgttaccgggaacagctgcttgagaacgctgccggtcaaatggtttgcaccattgacattcatcacccgtgcctgctgctttaccccctgcctgaatgggaaattatcgagcaaaaattatcgcgtctgtcgagcatgaacccggttgagcgccgtgtgcagcgcctactgttaggtcatgccagcgaatgtcagatggatggcgcaggtcgattgttaatcgcgccagtactgcggcaacatgccgggctgacaaaagaagtgatgctggttggacagttcaacaagtttgagctgtgggatgaaacaacctggcatcaacaggtcaaggaagatatcgacgcagagcagttggctaccggagacttatcggagcgactgcaggacttgtctctataaaatgatggaaaactataaacatactacggtgctgctggatgaagccgttaatggcctcaatatccgtcctgatggcatctacattgatgggacttttggtcgcggtggtcactcacgtctgatcctctcgcagcttggcgaagaggggcgtttgctggcgatcgatcgcgacccgcaggctatcgccgttgcgaagactattgatgatccgcgcttctccatcatccacggacctttctccgcgctgggcgaatacgttgccgagcgcgatcttatcggcaagatcgacggcattctcctcgatcttggcgtctcttcaccgcaacttgatgatgctgagcgcggcttttcctttatgcgcgatggtccgctggacatgcgtatggacccaacccgtgggcagtcagccgctgaatggctacaaaccgcagaagaagccgatatcgcctgggtattgaaaacctatggtgaagagcgttttgccaaacgcattgcccgcgccattgtcgagcgtaaccgcgaacagccgatgacccgcaccaaagaactggcggaagtcgtggctgctgcaacgccggtgaaagataagtttaaacatcccgcgacccgtaccttccaggcggtgcgcatttgggtaaacagtgaactggaggagatagagcaggcgctaaaaagctcgctcaacgtgctggccccgggtgggcggctttcgatcatcagcttccactcgctggaagaccgtattgtgaaacgttttatgcgtgaaaacagccgcggtccgcaagttccggcagggttaccgatgactgaagagcagctcaaaaaactgggtggccgtcagctgcgagcactaggcaagttaatgccgggcgaagaagaggtggctgagaaccctcgtgcccgtagttcagttctgcgtattgcagagaggacgaatgcatgatcagcagagtgacagaagctctaagcaaagttaaaggatcgatgggaagccacgagcgccatgcattgcctggtgttatcggtgacgatcttttgcgatttgggaagctgccactctgcctgttcatttgcattattttgacggcggtgactgtggtaaccacggcgcaccatacccgtttactgaccgctcagcgcgaacaactggtgctggagcgagatgctttagacattgaatggcgcaacctgatccttgaagagaatgcgctcggcgaccatagccgggtggaaaggatcgccacggaaaagctgcaaatgcagcatgttgatccgtcacaagaaaatatcgtagtgcaaaaataaggataaacgcgacgcatgaaagcagcggcgaaaacgcagaaaccaaaacgtcaggaagaacatgccaactttatcagttggcgttttgcgttgttatgcggctgtattctcctggcgctggcttttctgctcggacgcgtagcgtggttacaagttatctccccggatatgctggtgaaagagggcgacatgcgttctcttcgcgttcagcaagtttccacctcccgcggcatgattactgaccgttctggtcgcccgttagcggtgagcgtgccggtaaaagcgatttgggctgacccgaaagaagtgcatgacgctggcggtatcagcgtcggtgaccgctggaaggcgctggctaacgcgctcaatattccgctggatcagctttcagcccgcattaacgccaacccgaaagggcgctttatttatctggcgcgtcaggtgaaccctgacatggcggactacatcaaaaaactgaaactgccggggattcatctgcgtgaagaatctcgccgttattatccatccggcgaagtgactgctcacctcattggctttactaacgtcgatagtcaagggattgagggcgttgagaagagtttcgataaatggcttaccgggcagccgggtgagcgcattgtgcgtaaagaccgctatggtcgcgtaattgaagatatttcttctactgacagccaggctgcgcacaacctggcgctgagtattgatgaacgcctgcaggcgctggtttatcgcgaactgaacaatgcggtggcctttaacaaggctgaatctggtagcgccgtgctggtggatgtcaacaccggtgaagtgctggcgatggctaacagcccgtcatacaaccctaacaatctgagcggcacgccgaaagaggcgatgcgtaaccgtaccatcaccgacgtgtttgaacctggctcaacggttaaaccgatggtggtgatgaccgcgttgcaacgtggcgtggtgcgggaaaactcggtactcaataccattccttatcgaattaacggccacgaaatcaaagacgtggcacgctacagcgaattaaccctgaccggggtattacagaagtcgagtaacgtcggtgtttccaagctggcgttagcgatgccgtcctcagcgttagtagatacttactcacgttttggactgggaaaagcgaccaatttggggttggtcggagaacgcagtggcttatatcctcaaaaacaacggtggtctgacatagagagggccaccttctctttcggctacgggctaatggtaacaccgttacagttagcgcgagtctacgcaactatcggcagctacggcatttatcgcccactgtcgattaccaaagttgaccccccggttcccggtgaacgtgtcttcccggaatccattgtccgcaccgtggtgcatatgatggaaagcgtggcgctaccgggcggcggcggcgtgaaggcggcgattaaaggctatcgtatcgccattaaaaccggtaccgcgaaaaaggtcgggccggacggtcgctacatcaataaatatattgcttataccgcaggcgttgcgcctgcgagtcagccgcgcttcgcgctggttgttgttatcaacgatccgcaggcgggtaaatactacggcggcgccgtttccgcgccggtctttggtgccatcatgggcggcgtattgcgtaccatgaacatcgagccggatgcgctgacaacgggcgataaaaatgaatttgtgattaatcaaggcgaggggacaggtggcagatcgtaatttgcgcgaccttcttgctccgtgggtgccagacgcaccttcgcgagcactgcgagagatgacactcgacagccgtgtggctgcggcgggcgatctctttgtagctgtagtaggtcatcaggcggacgggcgtcgatatatcccgcaggcgatagcgcaaggtgtggctgccattattgcagaggcgaaagatgaggcgaccgatggtgaaatccgtgaaatgcacggcgtaccggtcatctatctcagccagctcaacgagcgtttatctgcactggcgggccgcttttaccatgaaccctctgacaatttacgtctcgtgggcgtaacgggcaccaacggcaaaaccacgactacccagctgttggcgcagtggagccaactgcttggcgaaatcagcgcggtaatgggcaccgttggtaacggcctgctggggaaagtgatcccgacagaaaatacaaccggttcggcagtcgatgttcagcatgagctggcggggctggtggatcagggcgcgacgttttgcgcaatggaagtttcctcccacgggctggtacagcaccgtgtggcggcattgaaatttgcggcgtcggtctttaccaacttaagccgcgatcaccttgattatcatggtgatatggaacactacgaagccgcgaaatggctgctttattctgagcatcattgcggtcaggcgattattaacgccgacgatgaagtgggccgccgctggctggcaaaactgccggacgcggttgcggtatcaatggaagatcatattaatccgaactgtcacggacgctggttgaaagcgaccgaagtgaactatcacgacagcggtgcgacgattcgctttagctcaagttggggcgatggcgaaattgaaagccatctgatgggcgcttttaacgtcagcaacctgctgctcgcgctggcgacactgttggcactcggctatccactggctgatctgctgaaaaccgccgcgcgtctgcaaccggtttgcggacgtatggaagtgttcactgcgccaggcaaaccgacggtggtggtggattacgcgcatacgccggatgcactggaaaaagccttacaggcagcgcgtctgcactgtgcgggcaagctgtggtgtgtctttggctgtggtggcgatcgcgataaaggtaagcgtccactgatgggcgcaattgccgaagagtttgctgacgtggcggtggtgacggacgataacccgcgtaccgaagaaccgcgtgccatcatcaacgatattctggcgggaatgttagatgccggacatgccaaagtgatggaaggccgtgctgaagcggtgacttgcgccgttatgcaggctaaagagaatgatgtggtactggtcgcgggcaaaggccatgaagattaccagattgttggcaatcagcgtctggactactccgatcgcgtcacggtggcgcgtctgctgggggtgattgcatgattagcgtaacccttagccaacttaccgacattctcaacggtgaactgcaaggtgcagatatcacccttgatgctgtaaccactgatacccgaaaactgacgccgggctgcctgtttgttgccctgaaaggcgaacgttttgatgcccacgattttgccgaccaggcgaaagctggcggcgcaggcgcactactggttagccgtccgctggacatcgacctgccgcagttaatcgtcaaggatacgcgtctggcgtttggtgaactggctgcatgggttcgccagcaagttccggcgcgcgtggttgctctgacggggtcctccggcaaaacctccgttaaagagatgacggcggcgattttaagccagtgcggcaacacgctttatacggcaggcaatctcaacaacgacatcggtgtaccgatgacgctgttgcgcttaacgccggaatacgattacgcagttattgaacttggcgcgaaccatcagggcgaaatagcctggactgtgagtctgactcgcccggaagctgcgctggtcaacaacctggcagcggcgcatctggaaggttttggctcgcttgcgggtgtcgcgaaagcgaaaggtgaaatctttagcggcctgccggaaaacggtatcgccattatgaacgccgacaacaacgactggctgaactggcagagcgtaattggctcacgcaaagtgtggcgtttctcacccaatgccgccaacagcgatttcaccgccaccaatatccatgtgacctcgcacggtacggaatttaccctacaaaccccaaccggtagcgtcgatgttctgctgccgttgccggggcgtcacaatattgcgaatgcgctggcagccgctgcgctctccatgtccgtgggcgcaacgcttgatgctatcaaagcggggctggcaaatctgaaagctgttccaggccgtctgttccccatccaactggcagaaaaccagttgctgctcgacgactcctacaacgccaatgtcggttcaatgactgcagcagtccaggtactggctgaaatgccgggctaccgcgtgctggtggtgggcgatatggcggaactgggcgctgaaagcgaagcctgccatgtacaggtgggcgaggcggcaaaagctgctggtattgaccgcgtgttaagcgtgggtaaacaaagccatgctatcagcaccgccagcggcgttggcgaacattttgctgataaaactgcgttaattacgcgtcttaaattactgattgctgagcaacaggtaattacgattttagttaagggttcacgtagtgccgccatggaagaggtagtacgcgctttacaggagaatgggacatgttagtttggctggccgaacatttggtcaaatattattccggctttaacgtcttttcctatctgacgtttcgcgccatcgtcagcctgctgaccgcgctgttcatctcattgtggatgggcccgcgtatgattgctcatttgcaaaaactttcctttggtcaggtggtgcgtaacgacggtcctgaatcacacttcagcaagcgcggtacgccgaccatgggcgggattatgatcctgacggcgattgtgatctccgtactgctgtgggcttacccgtccaatccgtacgtctggtgcgtgttggtggtgctggtaggttacggtgttattggctttgttgatgattatcgcaaagtggtgcgtaaagacaccaaagggttgatcgctcgttggaagtatttctggatgtcggtcattgcgctgggtgtcgccttcgccctgtaccttgccggcaaagacacgcccgcaacgcagctggtggtcccattctttaaagatgtgatgccgcagctggggctgttctacattctgctggcttacttcgtcattgtgggtactggcaacgcggtaaacctgaccgatggtctcgacggcctggcaattatgccgaccgtatttgtcgccggtggttttgcgctggtggcgtgggcgaccggcaatatgaactttgccagctacttgcatataccgtatctgcgacacgccggggaactggttattgtctgtaccgcgatagtcggggcaggactgggcttcctgtggtttaacacctatccggcgcaggtctttatgggcgatgtaggttcgctggcgttaggtggtgcgttaggcattatcgccgtactgctacgtcaggaattcctgctggtgattatggggggcgtgttcgtggtagaaacgctttctgtcatcctgcaggtcggctcctttaaactgcgcggacaacgtattttccgcatggcaccgattcatcaccactatgaactgaaaggctggccggaaccgcgcgtcattgtgcgtttctggattatttcgctgatgctggttctgattggtctggcaacgctgaaggtacgttaatcatggctgattatcagggtaaaaatgtcgtcattatcggcctgggcctcaccgggctttcctgcgtggactttttcctcgctcgcggtgtgacgccgcgcgttatggatacgcgtatgacaccgcctggcctggataaattacccgaagccgtagaacgccacacgggcagtctgaatgatgaatggctgatggcggcagatctgattgtcgccagtcccggtattgcactggcgcatccatccttaagcgctgccgctgatgccggaatcgaaatcgttggcgatatcgagctgttctgtcgcgaagcacaagcaccgattgtggcgattaccggttctaacggcaaaagcacggtcaccacgctagtgggtgaaatggcgaaagcggcgggggttaacgttggtgtgggtggcaatattggcctgcctgcgttgatgctactggatgatgagtgtgaactgtacgtgctggaactgtcgagcttccagctggaaaccacctccagcttacaggcggtagcagcgaccattctgaacgtgactgaagatcatatggatcgctatccgtttggtttacaacagtatcgtgcagcaaaactgcgcatttacgaaaacgcgaaagtttgcgtggttaatgctgatgatgccttaacaatgccgattcgcggtgcggatgaacgctgcgtcagctttggcgtcaacatgggtgactatcacctgaatcatcagcagggcgaaacctggctgcgggttaaaggcgagaaagtgctgaatgtgaaagagatgaaactttccgggcagcataactacaccaatgcgctggcggcgctggcgctggcagatgctgcagggttaccgcgtgccagcagcctgaaagcgttaaccacattcactggtctgccgcatcgctttgaagttgtgctggagcataacggcgtacgttggattaacgattcgaaagcgaccaacgtcggcagtacggaagcggcgctgaatggcctgcacgtagacggcacactgcatttgttgctgggtggcgatggtaaatcggcggactttagcccactggcgcgttacctgaatggcgataacgtacgtctgtattgtttcggtcgtgacggcgcgcagctggcggcgctacgcccggaagtggcagaacaaaccgaaactatggaacaggcgatgcgcttgctggctccgcgtgttcagccgggcgatatggttctgctctccccagcctgtgccagccttgatcagttcaagaactttgaacaacgaggcaatgagtttgcccgtctggcgaaggagttaggttgatgcgtttatctctccctcgcctgaaaatgccgcgcctgccaggattcagtatcctggtctggatctccacggcgctaaagggctgggtgatgggctcgcgggaaaaagataccgacagcctgatcatgtacgatcgcaccttactgtggctgaccttcggcctcgcggcgattggctttatcatggtgacctcggcgtcaatgcccatagggcaacgcttaaccaacgatccgttcttcttcgcgaagcgtgatggtgtctatctgattttggcgtttattctggcgatcattacgctgcgtctgccgatggagttctggcaacgctacagtgccacgatgctgctcggatctatcatcctgctgatgatcgtcctggtagtgggtagctcggttaaaggggcatcgcgttggatcgatctcggtttgctgcgtatccagcctgcggagctgacaaaactgtcgctgttttgctatatcgccaactatctggtgcgtaaaggcgacgaagtacgtaataacctgcgcggcttcctgaaaccgatgggcgtgattctggtgttggcagtgttactgctggcacagccagaccttggtacggtggtggtgttgtttgtgactacgctggcgatgttgttcctggcgggagcgaaattgtggcagttcattgccattatcggtatgggcatttcagcggttgtgttgctgatactcgccgaaccgtaccgtatccgccgtgttaccgcattctggaacccgtgggaagatccctttggcagcggctatcagttaacgcaatcgctgatggcgtttggtcgcggcgaactttgggggcaaggtttaggtaactcggtacaaaaactggagtatctgccggaagcgcacactgactttattttcgccattatcggcgaagaactggggtatgtcggtgtggtgctggcacttttaatggtattcttcgtcgcttttcgcgcgatgtcgattggccgtaaagcattagaaattgaccaccgtttttccggttttctcgcctgttctattggcatctggtttagcttccaggcgctggttaacgtaggcgcggcggcggggatgttaccgaccaaaggtctgacattgccgctgatcagttacggtggttcgagcttactgattatgtcgacagccatcatgatgctgttgcgtattgattatgaaacgcgtctggagaaagcgcaggcgtttgtacgaggttcacgatgagtggtcaaggaaagcgattaatggtgatggcaggcggaaccggtggacatgtattcccgggactggcggttgcgcaccatctaatggctcagggttggcaagttcgctggctggggactgccgaccgtatggaagcggacttagtgccaaaacatggcatcgaaattgatttcattcgtatctctggtctgcgtggaaaaggtataaaagcactgatagctgccccgctgcgtatcttcaacgcctggcgtcaggcgcgggcgattatgaaagcgtacaaacctgacgtggtgctcggtatgggaggctacgtgtcaggtccaggtggtctggccgcgtggtcgttaggcattccggttgtacttcatgaacaaaacggtattgcgggcttaaccaataaatggctggcgaagattgccaccaaagtgatgcaggcgtttccaggtgctttccctaatgcggaagtagtgggtaacccggtgcgtaccgatgtgttggcgctgccgttgccgcagcaacgtttggctggacgtgaaggtccggttcgtgtgctggtagtgggtggttctcagggcgcacgcattcttaaccagacaatgccgcaggttgctgcgaaactgggtgattcagtcactatctggcatcagagcggcaaaggttcgcaacaatccgttgaacaggcgtatgccgaagcggggcaaccgcagcataaagtgacggaatttattgatgatatggcggcggcgtatgcgtgggcggatgtcgtcgtttgccgctccggtgcgttaacggtgagtgaaatcgccgcggcaggactaccggcgttgtttgtgccgtttcaacataaagaccgccagcaatactggaatgcgctaccgctggaaaaagcgggcgcagccaaaattatcgagcagccacagcttagcgtggatgctgtcgccaacaccctggccgggtggtcgcgagaaaccttattaaccatggcagaacgcgcccgcgctgcatccattccggatgccaccgagcgagtggcaaatgaagtgagccgggttgcccgggcgtaattgtagcgatgccttttgcatcgtatgaatttaagaagttaatggcgtaaagaatgaatacacaacaattggcaaaactgcgttccatcgtgcccgaaatgcgtcgcgttcggcacatacattttgtcggcattggtggtgccggtatgggcggtattgccgaagttctggccaatgaaggttatcagatcagtggttccgatttagcgccaaatccggtcacgcagcagttaatgaatctgggtgcgacgatttatttcaaccatcgcccggaaaacgtacgtgatgccagcgtggtcgttgtttccagcgcgatttctgccgataacccggaaattgtcgccgctcatgaagcgcgtattccggtgatccgtcgtgccgaaatgctggctgagttaatgcgttttcgtcatggcatcgccattgccggaacgcacggcaaaacgacaaccaccgcgatggtttccagcatctacgcagaagcggggctcgacccaaccttcgttaacggcgggctggtaaaagcggcgggggttcatgcgcgtttggggcatggtcggtacctgattgccgaagcagatgagagtgatgcatcgttcctgcatctgcaaccgatggtggcgattgtcaccaatatcgaagccgaccacatggatacctaccagggcgactttgagaatttaaaacagacttttattaattttctgcacaacctgccgttttacggtcgtgcggtgatgtgtgttgatgatccggtgatccgcgaattgttaccgcgagtggggcgtcagaccacgacttacggcttcagcgaagatgccgacgtgcgtgtagaagattatcagcagattggcccgcaggggcactttacgctgctgcgccaggacaaagagccgatgcgcgtcaccctgaatgcgccaggtcgtcataacgcgctgaacgccgcagctgcggttgcggttgctacggaagagggcattgacgacgaggctattttgcgggcgcttgaaagcttccaggggactggtcgccgttttgatttcctcggtgaattcccgctggagccagtgaatggtaaaagcggtacggcaatgctggtcgatgactacggccaccacccgacggaagtggacgccaccattaaagcggcgcgcgcaggctggccggataaaaacctggtaatgctgtttcagccgcaccgttttacccgtacgcgcgacctgtatgatgatttcgccaatgtgctgacgcaggttgataccctgttgatgctggaagtgtatccggctggcgaagcgccaattccgggagcggacagccgttcgctgtgtcgcacaattcgtggacgtgggaaaattgatcccattctggtgccggatccggcgcgggtagccgagatgctggcaccggtattaaccggtaacgacctgattctcgttcagggggctggtaatattggaaaaattgcccgttctttagctgaaatcaaactgaagccgcaaactccggaggaagaacaacatgactgataaaatcgcggtcctgttgggtgggacctccgctgagcgggaagtttctctgaattctggcgcagcggtgttagccggactgcgtgaaggcggtattgacgcgtatcctgtcgacccgaaagaagtcgacgtgacgcaactgaagtcgatgggctttcagaaagtgtttatcgcgctacacggtcgcggcggtgaagatggtacgctgcaggggatgctcgagctgatgggcttgccttataccggaagcggagtgatggcatctgcgctttcaatggataaactacgcagcaaacttctatggcaaggtgccggtttaccggtcgcgccgtgggtagcgttaacccgcgcagagtttgaaaaaggcctgagcgataagcagttagcagaaatttctgctctgggtttgccggttatcgttaagccgagccgcgaaggttccagtgtgggaatgtcaaaagtagtagcagaaaatgctctacaagatgcattaagattggcatttcagcacgatgaagaagtattgattgaaaaatggctaagtgggccggagttcacggttgcgatactcggtgaagaaattttaccgtcaatacgtattcaaccgtccggaaccttctatgattatgaggcgaagtatctctctgatgagacacagtatttctgccccgcaggtctggaagcgtcacaagaggccaatttgcaggcattagtgctgaaagcatggacgacgttaggttgcaaaggatggggacgtattgacgttatgctggacagcgatggacagttttatctgctggaagccaatacctcaccgggtatgaccagccacagcctggtgccgatggcggcacgtcaggcaggtatgagcttctcgcagttggtagtacgaattctggaactggcggactaatatgtcgcaggctgctctgaacacgcgaaacagcgaagaagaggtttcttctcgccgcaataatggaacgcgtctggcggggatccttttcctgctgaccgttttaacgacagtgttggtgagcggctgggtcgtgttgggctggatggaagatgcgcaacgcctgccgctctcaaagctggtgttgaccggtgaacgccattacacacgtaatgacgatatccggcagtcgatcctggcattgggtgagccgggtacctttatgacccaggatgtcaacatcatccagacgcaaatagaacaacgcctgccgtggattaagcaggtgagcgtcagaaagcagtggcctgatgaattgaagattcatctggttgaatatgtgccgattgcgcggtggaatgatcaacatatggtagacgcggaaggaaataccttcagcgtgccgccagaacgcaccagcaagcaggtgcttccaatgctgtatggcccggaaggcagcgccaatgaagtgttgcagggctatcgcgaaatggggcagatgctggcaaaggacagatttactctgaaggaagcggcgatgaccgcgcggcgttcctggcagttgacgctgaataacgatattaagctcaatcttggccggggcgatacgatgaaacgtttggctcgctttgtagaactttatccggttttacagcagcaggcgcaaaccgatggcaaacggattagctacgttgatttgcgttatgactctggagcggcagtaggctgggcgcccttgccgccagaggaatctactcagcaacaaaatcaggcacaggcagaacaacaatgatcaaggcgacggacagaaaactggtagtaggactggagattggtaccgcgaaggttgccgctttagtaggggaagttctgcccgacggtatggtcaatatcattggcgtgggcagctgcccgtcgcgtggtatggataaaggcggggtgaacgacctcgaatccgtggtcaagtgcgtacaacgcgccattgaccaggcagaattgatggcagattgtcagatctcttcggtatatctggcgctttctggtaagcacatcagctgccagaatgaaattggtatggtgcctatttctgaagaagaagtgacgcaagaagatgtggaaaacgtcgtccataccgcgaaatcggtgcgtgtgcgcgatgagcatcgtgtgctgcatgtgatcccgcaagagtatgcgattgactatcaggaagggatcaagaatccggtaggactttcgggcgtgcggatgcaggcaaaagtgcacctgatcacatgtcacaacgatatggcgaaaaacatcgtcaaagcggttgaacgttgtgggctgaaagttgaccaactgatatttgccggactggcatcaagttattcggtattgacggaagatgaacgtgaactgggtgtctgcgtcgtcgatatcggtggtggtacaatggatatcgccgtttataccggtggggcattgcgccacactaaggtaattccttatgctggcaatgtcgtgaccagtgatatcgcttacgcctttggcacgccgccaagcgacgccgaagcgattaaagttcgccacggttgtgcgctgggttccatcgttggaaaagatgagagcgtggaagtgccgagcgtaggtggtcgtccgccacggagtctgcaacgtcagacactggcagaggtgatcgagccgcgctataccgagctgctcaacctggtcaacgaagagatattgcagttgcaggaaaagcttcgccaacaaggggttaaacatcacctggcggcaggcattgtattaaccggtggcgcagcgcagatcgaaggtcttgcagcctgtgctcagcgcgtgtttcatacgcaagtgcgtatcggcgcgccgctgaacattaccggtttaacggattatgctcaggagccgtattattcgacggcggtgggattgcttcactatgggaaagagtcacatcttaacggtgaagctgaagtagaaaaacgtgttacagcatcagttggctcgtggatcaagcgactcaatagttggctgcgaaaagagttttaatttttatgaggccgacgatgattacggcctcaggcgacaggcacaaatcggagagaaactatgtttgaaccaatggaacttaccaatgacgcggtgattaaagtcatcggcgtcggcggcggcggcggtaatgctgttgaacacatggtgcgcgagcgcattgaaggtgttgaattcttcgcggtaaataccgatgcacaagcgctgcgtaaaacagcggttggacagacgattcaaatcggtagcggtatcaccaaaggactgggcgctggcgctaatccagaagttggccgcaatgcggctgatgaggatcgcgatgcattgcgtgcggcgctggaaggtgcagacatggtctttattgctgcgggtatgggtggtggtaccggtacaggtgcagcaccagtcgtcgctgaagtggcaaaagatttgggtatcctgaccgttgctgtcgtcactaagcctttcaactttgaaggcaagaagcgtatggcattcgcggagcaggggatcactgaactgtccaagcatgtggactctctgatcactatcccgaacgacaaactgctgaaagttctgggccgcggtatctccctgctggatgcgtttggcgcagcgaacgatgtactgaaaggcgctgtgcaaggtatcgctgaactgattactcgtccgggtttgatgaacgtggactttgcagacgtacgcaccgtaatgtctgagatgggctacgcaatgatgggttctggcgtggcgagcggtgaagaccgtgcggaagaagctgctgaaatggctatctcttctccgctgctggaagatatcgacctgtctggcgcgcgcggcgtgctggttaacatcacggcgggcttcgacctgcgtctggatgagttcgaaacggtaggtaacaccatccgtgcatttgcttccgacaacgcgactgtggttatcggtacttctcttgacccggatatgaatgacgagctgcgcgtaaccgttgttgcgacaggtatcggcatggacaaacgtcctgaaatcactctggtgaccaataagcaggttcagcagccagtgatggatcgctaccagcagcatgggatggctccgctgacccaggagcagaagccggttgctaaagtcgtgaatgacaatgcgccgcaaactgcgaaagagccggattatctggatatcccagcattcctgcgtaagcaagctgattaagaattgactggaatttgggtttcgaggctctttgtgctaaactggcccgccgaatgtatagtacacttcggttggataggtaatttggcgagataatacgatgatcaaacaaaggacacttaaacgtatcgttcaggcgacgggtgtcggtttacataccggcaagaaagtcaccctgacgttacgccctgcgccggccaacaccggggtcatctatcgtcgcaccgacttgaatccaccggtagatttcccggccgatgccaaatctgtgcgtgataccatgctctgtacgtgtctggtcaacgagcatgatgtacggatttcaaccgtagagcacctcaatgctgctctcgcgggcttgggcatcgataacattgttatcgaagttaacgcgccggaaatcccgatcatggacggcagcgccgctccgtttgtatacctgctgcttgacgccggtatcgacgagttgaactgcgccaaaaaatttgttcgcatcaaagagactgttcgtgtcgaagatggcgataagtgggctgaatttaagccgtacaatggtttttcgctggatttcaccatcgattttaaccatccggctattgattccagcaaccagcgctatgcgatgaacttctccgctgatgcgtttatgcgccagatcagccgtgcgcgtacgttcggtttcatgcgtgatatcgaatatctgcagtcccgtggtttgtgcctgggcggcagcttcgattgtgccatcgttgttgacgattatcgcgtactgaacgaagacggcctgcgttttgaagacgaatttgtgcgtcacaaaatgctcgatgcgatcggtgacttgttcatgtgtggtcacaatattattggtgcatttaccgcttataaatccggtcatgcactgaataacaaactgctgcaggctgtcctggcgaaacaggaagcctgggaatatgtgaccttccaggacgacgcagaactgccgttggccttcaaagcgccttcagctgtactggcataacgacatttatactgtcgtataaaattcgactggcaaatctggcactctctccggccaggtgaaccagtcgtttttttttgaattttataagagctataaaaaacggtgcgaacgctgttttcttaagcacttttccgcacaacttatcttcattcgtgctgtggactgcaggctttaatgataagatttgtgcgctaaatacgtttgaatatgatcgggatggcaataacgtgagtggaatactgacgcgctggcgacagtttggtaaacgctacttctggccgcatctcttattagggatggttgcggcgagtttaggtttgcctgcgctcagcaacgccgccgaaccaaacgcgcccgcaaaagcgacaacccgcaaccacgagccttcagccaaagttaactttggtcaattggccttgctggaagcgaacacacgccgcccgaattcgaactattccgttgattactggcatcaacatgccattcgcacggtaatccgtcatctttctttcgcaatggcaccgcaaacactgcccgttgctgaagaatctttgcctcttcaggcgcaacatcttgcattactggatacgctcagcgcgctgctgacccaggaaggcacgccgtctgaaaagggttatcgcattgattatgcgcattttaccccacaagcaaaattcagcacgcccgtctggataagccaggcgcaaggcatccgtgctggccctcaacgcctcacctaacaacaataaacctttacttcattttattaactccgcaacgcggggcgtttgagattttattatgctaatcaaattgttaactaaagttttcggtagtcgtaacgatcgcaccctgcgccggatgcgcaaagtggtcaacatcatcaatgccatggaaccggagatggaaaaactctccgacgaagaactgaaagggaaaaccgcagagtttcgtgcacgtctggaaaaaggcgaagtgctggaaaatctgatcccggaagctttcgccgtggtacgtgaggcaagtaagcgcgtctttggtatgcgtcacttcgacgttcagttactcggcggtatggttcttaacgaacgctgcatcgccgaaatgcgtaccggtgaaggaaaaaccctgaccgcaacgctgcctgcttacctgaacgcactaaccggtaaaggcgtgcacgtagttaccgtcaacgactacctggcgcaacgtgacgccgaaaacaaccgtccgctgtttgaattccttggcctgactgtcggtatcaacctgccgggcatgccagcaccggcaaagcgcgaagcttacgcagctgacatcacttacggtacgaacaacgaatacggctttgactacctgcgcgacaacatggcgttcagccctgaagaacgtgtacagcgtaaactgcactatgcgctggtggacgaagtggactccatcctgatcgatgaagcgcgtacaccgctgatcatttccggcccggcagaagacagctcggaaatgtataaacgcgtgaataaaattattccgcacctgatccgtcaggaaaaagaagactccgaaaccttccagggcgaaggccacttctcggtggacgaaaaatctcgccaggtgaacctgaccgaacgtggtctggtgctgattgaagaactgctggtgaaagagggcatcatggatgaaggggagtctctgtactctccggccaacatcatgctgatgcaccacgtaacggcggcgctgcgcgctcatgcgctgtttacccgtgacgtcgactacatcgttaaagatggtgaagttatcatcgttgacgaacacaccggtcgtaccatgcagggccgtcgctggtccgatggtctgcaccaggctgtggaagcgaaagaaggtgtgcagatccagaacgaaaaccaaacgctggcttcgatcaccttccagaactacttccgtctgtatgaaaaactggcggggatgaccggtactgctgataccgaagctttcgaatttagctcaatctacaagctggataccgtcgttgttccgaccaaccgtccaatgattcgtaaagatctgccggacctggtctacatgactgaagcggaaaaaattcaggcgatcattgaagatatcaaagaacgtactgcgaaaggccagccggtgctggtgggtactatctccatcgaaaaatcggagctggtgtcaaacgaactgaccaaagccggtattaagcacaacgtcctgaacgccaaattccacgccaacgaagcggcgattgttgctcaggcaggttatccggctgcggtgactatcgcgaccaatatggcgggtcgtggtacagatattgtgctcggtggtagctggcaggcagaagttgccgcgctggaaaatccgaccgcagagcaaattgaaaaaattaaagccgactggcaggtacgtcacgatgcggtactggaagcaggtggcctgcatatcatcggtaccgagcgtcacgaatcccgtcgtatcgataaccagttgcgcggtcgttctggtcgtcagggggatgctggttcttcccgtttctacctgtcgatggaagatgcgctgatgcgtatttttgcttccgaccgagtatccggcatgatgcgtaaactgggtatgaagccaggcgaagccattgaacacccgtgggtgactaaagcgattgccaacgcccagcgtaaagttgaaagccgtaacttcgacattcgtaagcaactgctggaatatgatgacgtggctaacgatcagcgtcgcgccatttactcccagcgtaacgaactgttggatgtcagcgatgtgagcgaaaccattaacagcattcgtgaagatgtgttcaaagcgaccattgatgcctacattccaccacagtcgctggaagaaatgtgggatattccggggctgcaggaacgtctgaagaacgatttcgacctcgatttgccaattgccgagtggctggataaagaaccagaactgcatgaagagacgctgcgtgagcgcattctggcgcagtccatcgaagtgtatcagcgtaaagaagaagtggttggtgctgagatgatgcgtcacttcgagaaaggcgtcatgctgcaaacgcttgactccctgtggaaagagcacctggcagcgatggactatctgcgtcagggtatccacctgcgtggctacgcacagaaagatccgaagcaggaatacaaacgtgaatcgttctccatgtttgcagcgatgctggagtcgttgaaatatgaagttatcagtacgctgagcaaagttcaggtacgtatgcctgaagaggttgaggagctggaacaacagcgtcgtatggaagccgagcgtttagcgcaaatgcagcagcttagccatcaggatgacgactctgcagccgcagctgcactggcggcgcaaaccggagagcgcaaagtaggacgtaacgatccttgcccgtgcggttctggtaaaaaatacaagcagtgccatggccgcctgcaataaaagctaactgttgaagtaaaaggcgcaggattctgcgccttttttataggtttaagacaatgaaaaagctgcaaattgcggtaggtattattcgcaacgagaacaatgaaatctttataacgcgtcgcgcagcagatgcgcacatggcgaataaactggagtttcccggcggtaaaattgaaatgggtgaaacgccggaacaggcggtggtgcgtgaacttcaggaagaagtcgggattaccccccaacatttttcgctatttgaaaaactggaatatgaattcccggacaggcatataacactgtggttttggctggtcgaacgctgggaaggggagccgtggggtaaagaagggcaacccggtgagtggatgtcgctggtcggtcttaatgccgatgattttccgccagccaatgaaccggtaattgcgaagcttaaacgtctgtaggtcagataaggcgttttcgccgcatccgacattcgcacacgatgcctgatgcgacgctggcgcgtcttatcaggcctaaagggatttctaactcattgataaatttgtttttgtaggtcggataaggcgttcacgccgcatccgacatttgcacaagatgcctgatgcgacgctgtccgcgtcttatcaggcctacgtgcggcatcagacaaatgtcactgctttggttcttcgctccagtcatcgctttcggaaagatcgccactgctggggattcgtttttcttcagcagcccattctccgaggtcgatcagctgacaacgtttggagcaaaatggccgaaacgggctgatttcaccccacaccaccgttttcccgcaggttgggcaattcaccgtaatagtttctgacatttttactccttagcaacaggccagttcgaaatccagacgttccggtacctgtccgttttcagtgtccagcggcataaaacgaatggcaaaacggctcttatgtccggaaatttgcggataaagctgtgaatcgagcgacagattcaggcgcagcaagtcggcatcgccaccgttatcctgataaaaaccattcaggctggtttgtttacggaagggggccgactggcgaattaaatccagcaccatggtaagtgcctgggtgagcgggttcaggctggcaatccaggtttctacctggctgtcgcgctgcgcctggggtagatgcagccaaatgtgcaatgtaggtaaatcaaagctgcaacagccgcctgggatgctcagtcgctgacgcaccagagcaatcaaacgatcttcacgcagaaattgcccgatacgcggcgcggaaattaatacgctccccgccgcttttaactgctgaattaatgcttcaatacggctctggtccacgccaggcacgccaatccaggtctggagtttacgttgctgccggtcaagttctttcaacagctcagtgcggacttcgccgcgctcgaaaacatccagtaattcactgacattacggaagaaatgcagcgcgccagcgtggtcaacgatgggtaaattaacggtgagttgctgaatcaaaaactcaatgcgcagccatgtacgcattttttcatttagtggatgttcaaaaaggacctgggtctgcattacggtttttcctgtgagacaaactgcgacgcaagctgcaaatagtgtgcgtgcaggcgggcaacatccgatgcgatagcatccggtgcgccgttattatcaatgacgtcatctgccacggcaaggcgggcttcgcgcgttgcctgagcagcaaggatttgttcgacatgctcgcgagttacatcatcgcgctgcatggtgcgcttaagttgcgtttctgggctgacatccaccacaagcactcgattcgcttttttatacagtgagttttctaccagcaatggcacaacccacagtacatagggggaagtagcttgctggatctggtgttgcgtctcttgctgaatcagcggatgcagcagggcgttaagccagtttttctcttccgggttggcgaagatccgctcgcgcaaggcccggcgctgcaatgttccatcagcagcaatcatgttagcgccaaagtgatcagcaatggcatgtagcgcaggtgcacctggttcaaccacctgacgcgcaataatatcggcatcaatgacgttaattccgagatcagcaaacgcattggcaacggtactcttgccactgccaatgcctcccgttaaggcaactatatacctcataatttatattcccgggaattcatcatgattatcaaaacgttaaaaatgagtgcacgaaagcgaaattgatgaaacgttcgctcactatttaccaggtaaatttatgggattgtagcgtaaaaaaagacaatttcgcagtcttgcgccgcattgattagtgcgtatgatagcgtcactggagttgcgctcttacccttatagccattaaccccaggaatccgcacatgcgtattgaagaagatctgaagttaggttttaaagacgttctcatccgccctaaacgctccactcttaaaagccgttccgatgttgaactggaacgtcaattcaccttcaaacattcaggtcagagctggtccggcgtgccgattatcgccgcaaatatggacaccgtaggcacattttctatggcctctgcgctggcttcttttgatattttgactgctgtgcataaacactattctgtcgaagagtggcaagcgtttatcaacaattcttccgctgatgtgctgaaacatgtgatggtttctaccggtacgtctgatgcggatttcgaaaaaactaaacagattctcgacctgaacccggcattaaacttcgtttgtattgacgtggcgaatggttattccgaacacttcgtgcagttcgttgcgaaagcgcgtgaagcgtggccgaccaaaaccatttgtgctggtaacgtagtgactggtgaaatgtgtgaggagcttatcctctcaggtgccgatatcgttaaagttggcattggcccaggttctgtttgtacaactcgcgtcaaaacaggcgtcggttatccgcaactttctgcggtaatcgaatgtgccgatgctgcgcacggtctgggcggaatgatcgtcagcgatggtggctgcaccacgccgggcgatgtggcgaaagcctttggcggcggtgccgatttcgtcatgcttggcggcatgctggcgggccacgaagagagcggcggtcgcatcgttgaggagaacggcgagaaatttatgctgttctacggcatgagctccgagtctgcgatgaaacgtcacgttggcggcgttgcggaatatcgcgcagcagaaggtaaaaccgttaagctgccgctgcgaggcccggttgaaaataccgcgcgagatattttgggcggcctgcgttcagcttgtacatacgttggggcttcacgcctgaaagagctgaccaagcgcaccacgtttattcgtgtgcaggaacaagaaaaccgcatcttcaacaacctgtaatctcccaacgctggcgtggagcaacacgccagcgttatcccatcccactcatcgcatcgcctaaatggaaaattggcagatacattgccaccaccagcgtaccaataattcctcccgttatgatcagcaacgccggttccagtaaggctgcgaggttatccgccagcgccattgtgttttcccgatgatgatgggcgaggttgtctaacatgagatccagagagccggatgcctctcctgttctcactaattgcaaacagagcgggctaaactcaccggtattttttagcgccagccagatgggttgaccgttactgatatcgtgctggatttgtgtcagaagttgcacccagtacgggcagcgcattgtttctctgacgctctctacgccctgtaaaaaagtaatgcctgcactttgtgtcagcgccagaatcgtaaagatctgcgtgagtttttgtccccgcatcagtgaacccataatcgggatgcgtaacagcaatttctgccgcactataagccaggtcggtcggcgcatcagcaacttattggctatcgccagcagaaagccgaacaacaccagcagccagctccattcgccactaaagtctgccagcgtcatgatcccctgcgttagtgccggtagtggggtgttgaaggtcttatagatagcggcaaactccggcagaacaaaatgcagcattgccacaaccaccatgattgccatcgctaaaatgatgatgggataacgtaacgctgatttcactttgtcggtcaactgacgctgggctttttgctgacgcgccagttcaaagcagcattcatccagcttaccggtcagttcacccgtgcggatcatcgcctgatagagcggcggaaatacctctgaccagggtaataaggcattggaaaaagcaatgccctgttcgagatcgtgcgccagcgattgcagcaacgcttgccattgcttactgggatgctgttccgccagcagagccagcccttcagaaagcgttaaccctgctttgagtagcgtcgccagttgatgaatgacttccgcgcttttatctcctcgccactgcgcagaattgatggcgattcgcttcaggcttagtggggtaaccatctgttgctgtagtgccataagcagtaaagtacggctctctgcccatagcatcccatcttgcgcattgccgtcgccggttatgccatgccagcgccagagttgcttactcgccatgcggcatccccagtacgcggattaactcttcaaaggtggttaagccttgctctacggccaggcagccgttttcaaaaagcgtacgcatacccgcctgtcgtgcgtgcgtttccagcgattcaacgtcggtattagcggaaataagctgacgaatgaccggcgttatgggcagaacttcaaataaggccgtacgaccataaaaaccgtggtagcaatgtacacaaccgggtgcctgccagtggggcagcggcgatggccatacattgtctggaatgtggatgggctccccttgctgccggcgacaatgtgggcaaagtttgcgtaccagacgctgggctattaccagcgtaagcgccgatgatagcatccagcgggcgacccccatttgctgtaaacgtaccagcgtttcgcaggtggaattagtgtgtagggtagacaacaccaggtgaccagtttgcgccgctttaatagcgatctctgctgtttcgccatcgcggatctctccgatcatgatgacgtcaggatcctggcgcaataacgcacgcaaaacgccctgaaaggtgagtccggcacgcggatggatttgcgtctggtttagtccggctatggggatctcaactggatcttcgacgctacaaatattaatgtcagcggtattcagcttttgcagggcactataaagcgtgaccgttttgccgctgccggtagggccagttaccagcaccagtccctgtggttgttgcaaggcatgagcaaagtccgccagttgtaacggctgcattccaagcgtgttgacatccagtgcctgacccacctgctgtaacaaccttaataccaccttttcaccaccccgacatggtaaggtcgcaatacgaaatgagacggcgtttcctgccagttcgacagtgaattgcccgtcctgcggcaggcgatgttccgcaatatccaggtttcccagcacttttaatctggcggttaatgcgactccggcatccggtgaaacatccggtaaaggatgcaatacgccgtcgatacgcaagcggatgcggtaggcattgtccgctggttcgatatgaatatcagacgcgcgttgttccagcgcagattgtaacgttcgagttagcaactctgctttgggctgatgcttctcctgaacagctacgggcaatgtctgttgtgtgcgactggcgtgaccttccatttgttggcgcgtccagcaggtgatctcaatacgtttggtggtagcgaaatgcaatgcgtccagtagctcatgcgaaggtgcatcgactaccgcaacatgaaccacctcttcgctggcatccagcaagactccatgataacgcagacacagggcagtgagctgtggaatattcattgccgctccttagttggcgtcatcaaagcggaagacatcttcgcaggcttgctgcaatgcgctgtcactttgaatattgcagttgcgcgtccagccggtgacgccgtttgcgttatcccaacccggtgtcatgacgacgcttagcccattgagactttcttgcccggtcagcgacaccacgccctttgccacactcatggctgaaacatagcgggtggtggtaggcgagggaatgccattgctgccaccgtcgcaggtatctaatccaccatgttccagcgcgcacaactctacggcggtacggtaaggcacaaaggtttgtagcatgtcggtgagtgcggctttgcgcaggtagttttgataagcgggaataccaatggcgcttaaaatggcaatgatgccaataaccaccatcagttcgataagtgtaaaaccgcgttgcttgtccatctgtttcgctccttgatttggttggcgctactttggcaaacgccatcagcacaggcgaggggcaaaaaacgaaacgggaaagcagattccgaggttttttatttcgttgcagcgaaagacaagaaatttgcgaggcgttacgaagaaagttggggaaggggagattatccgcccgcgatggagcggataaatctgtcaactattagcgaaaacgcattgaaaggtcgagtgcttgtacgtgtttagttagcgcaccgacggagataaagtccacgcccgtttcggcaaattcacgcagtgttttgtcagtgacgttgccagacacttccagtagcgccttgccgttggtgcgtttgacggcttcgcgcatctgttctgtttcgaagttatccagcatgatgatatcggctcctgctttcagggcttcatcaagttcttccagattctctacttcgacttctactggcgcatccgggtgcagccaggacgctttttcgaccgcctggcgcactgagccggaggcaataatatggttttctttgatcaggaaggcatcagaaagccccagacggtgattcgctccgccgccgcaaagtaccgcgtatttcagagctgaacgcaggccgggtaaggttttgcgcgtatccaacaactgcgtgttggtgccttccagcaattcgacatagtggcgtaccttactggcaactcctgaaagggtttgcacaaaattaagcgcagtgcgttcgcccgttaacagcacgcgggatgggccttcaagttcgaacaaggattgattggcattgatgacatcgccgtcatccacatgccagattatggtgacatcgtcgcctgccagttgaataaacacctcttcaacccagcgtttgccgcaaaagacgccattctcgcgggtgatcaccgtggcatgagagcgagaattttccggtaaaagttttgccgtaatatcattgttggcatcgactgttccgcctaaatcttcccgcagcgcctgggccaccgcgccggggatatcgagattaatgcgttccagcagctcgtcacgtcgggtgtcagggttatagcggcgaggcggcatgttaaaactccagatagctaacgaatcataaggtagaaacatgctactctgaaccgggtattagcaccacatataaggagatcctgcatgttgttagaacaggggtggctggttggcgcgcgccgcgttccctcaccacattacgattgccgcccggatgacgaaacacccaccctgctggtggtgcacaatattagcctgccgccaggcgagtttggcggtccgtggatcgacgcattattcactggaactattgatccgcaggcacatcctttctttgctgagatcgcccatttgcgcgtctccgctcactgtttgattcgccgtgatggtgaaatagtccagtatgttcctttcgataaacgtgcatggcatgcgggagtctctcagtatcaggggcgcgaacgctgcaatgatttttctattgggattgagcttgaaggcaccgatacgctggcgtataccgatgcgcagtatcaacagcttgcggcggttacgcgggcactgattgattgctatccggatatcgctaaaaacatgacgggccattgtgatattgcgccggatcggaaaaccgatcccggtcctgcatttgattgggcacggtttcgtgtgctggtcagcaaggagacaacatgacgctatttacaaccttactggtgttaattttcgagcgcctgtttaagttgggcgagcactggcagcttgatcatcgtcttgaagcgttctttcggcgggtgaaacatttttctctcgggcgcacgttaggcatgaccattattgcgatgggcgtgacttttttactgttacgcgcattgcagggagtattgttcaacgttcccacgctactggtgtggctgctgattggtttgctgtgtattggcgcaggtaaagttcgtcttcattatcatgcttatctgacagctgcttcacgtaatgatagccatgcccgtgccacgatggctggcgaactcaccatgattcacggcgtcccggcaggctgcgacgaacgtgagtatttgcgtgagctgcaaaatgcattgctgtggattaactttcgtttttatcttgcaccgctgttctggctgattgtggggggaacctggggacccgttacgctgatggggtatgcgtttttgcgtgcatggcaatactggctggcgcgatatcagacgccgcatcatcgtttacagtccggcattgatgccgtgcttcatgtactggattgggtgccggttcgtcttgcgggtgtggtatatgccttgatcggtcatggtgagaaagcgttaccggcctggtttgcttcgctgggtgatttccatacttcgcagtatcaggtgttaacgcgtctggcgcagttctctctggcgcgtgaaccgcatgtcgataaggtggagacgccgaaggcagcggtttcaatggcgaagaaaacctcgttcgtggtcgtggtggtgattgcactactgacgatttacggggcgttggtgtaaagattattgccctcaccctgtacgggtgagggcgtagagagattaatgcgcttttacggctttggcggttttctctttaaacagatagccgatacctaacacgatcagccataccgggatcaggtataccgaaatcgccattcctggggtcatcagcataatcaccagtaccgccgccataaacagcaggcagatccagttacccagcggataaagcagagcagggaagcgagttaccacgccttgttcctgcttggcgcgacggaatttcatatgcgccaggctaatcatcgcccagttgattaccagtgcagataccaccagcgccattaacagtccgaaagcggactctggggcaaggtagttaatcagtacgcacaacgccgttaccagtgcagacaccagaatggtatttactggtacaccacgtttatcgacagacgccagcgcttttggcgcattaccctgttgtgccagaccaaacagcatacggctgttgcaatatacgcagctgttgtacacggagagcgccgcagtcagtaccacgatgttcagcgcattcgccacaaaggtatcgcctaactcgtggaagatcagcacaaacggactggtatcggcggtaacgcgggtccacggcatcagtgagagcagaacggctaacgaaccaatatagaaaatcaggatgcggtagataacctggttagttgctttcggtatactttgctccgggttatcagcttctgctgcggtgatccccaccagttccagaccaccgaacgagaacatgataatcgccatcatcatcaccagcccggtgaagccgtgcggcaggaaaccaccctgatcccacaggttgctaacggtcgcctgcgggccgccgttgccactgaatagcagccagccgccgaagatgatcatcgctaccaccgcgataactttgataatggcaaaccagaactccatctcgccaaacactttaacgttggtcaggttgatggcgttaatcaccacaaagaatacggcggcagaaacccaggtggggatttccggataccagaactgaatgtatttacccacggcagtcagctcagccatggcaactaaaacgtacagtacccagtagttccagccagaggcgaaaccggcaaaactgccccagtatttataagcaaagtggctaaaggagcctgcgacaggttcttcgaccaccatttcacccagctgacgcatgatcagaaaggcgataaaaccagcaatggcgtaacccaggataatccctggccctgcggactgtattacggaggcgctacccaggaataacccggtccctatcgcgccacccagcgcgataagctgaatatggcggtttttaaggccgcgctttagctgctcgccgtgctgttgaccttccatcatgaaacctcgtgcggtggttgtttttttgatctacgcagtgatgcgtgtgtaagtttgcaattccgtttgttgtattaatttgtttacatcaaagaagtttgaattgttacaaaaagacttccgtcagatcaagaataatggtatgcggcagcgaatgcacccgctttatgcatggttgaagatgagttgcttaaaaagaaaccgtttgtaaagctcagcctcaacccctctcaatatgtagaatgaatttaaattcgttttaattgaattaaaaatcacaaaattggtaagtgaatcggttcaattcggatttttatagtttaataatcgttaaaaaactcctttcctacgtaaagtctacatttgtgcatagttacaactttgaaacgttatatatgtcaagttgttaaaatgtgcacagtttcatgatttcaatcaaaacctgtatggacataaggtgaatactttgttactttagcgtcacagacatgaaattggtaagaccaattgacttcggcaagtggcttaagacaggaactcatggcctacagcaaaatccgccaaccaaaactctccgatgtgattgagcagcaactggagtttttgatcctcgaaggcactctccgcccgggcgaaaaactcccaccggaacgcgaactggcaaaacagtttgacgtctcccgtccctccttgcgtgaggcgattcaacgtctcgaagcgaagggcttgttgcttcgtcgccagggtggcggcacttttgtccagagcagcctatggcaaagcttcagcgatccgctggtggagctgctctccgaccatcctgagtcacagtatgacttgctcgaaacacgacacgccctggaaggtatcgccgcttattacgccgcgctgcgtagtaccgatgaagacaaggaacgcatccgtgaactccaccacgccatagagctggcgcagcagtctggcgatctggacgcggaatcaaacgccgtactccagtatcagattgccgtcaccgaagcggcccacaatgtggttctgcttcatctgctaaggtgtatggagccgatgttggcccagaatgtccgccagaacttcgaattgctctattcgcgtcgcgagatgctgccgctggtgagtagtcaccgcacccgcatatttgaagcgattatggccggtaagccggaagaagcgcgcgaagcatcgcatcgccatctggcctttatcgaagaaattttgctcgacagaagtcgtgaagagagccgccgtgagcgttctctgcgtcgtctggagcaacgaaagaattagtgatttttctggtaaaaattatccagaagatgttgtaaatcaagcgcatataaaagcgcggcaactaaacgtagaacctgtcttattgagctttccggcgagagttcaatgggacaggttccagaaaactcaacgttattagatagataaggaataacccatgtcagaacgtttcccaaatgacgtggatccgatcgaaactcgcgactggctccaggcgatcgaatcggtcatccgtgaagaaggtgttgagcgtgctcagtatctgatcgaccaactgcttgctgaagcccgcaaaggcggtgtaaacgtagccgcaggcacaggtatcagcaactacatcaacaccatccccgttgaagaacaaccggagtatccgggtaatctggaactggaacgccgtattcgttcagctatccgctggaacgccatcatgacggtgctgcgtgcgtcgaaaaaagacctcgaactgggcggccatatggcgtccttccagtcttccgcaaccatttatgatgtgtgctttaaccacttcttccgtgcacgcaacgagcaggatggcggcgacctggtttacttccagggccacatctccccgggcgtgtacgctcgtgctttcctggaaggtcgtctgactcaggagcagctggataacttccgtcaggaagttcacggcaatggcctctcttcctatccgcacccgaaactgatgccggaattctggcagttcccgaccgtatctatgggtctgggtccgattggtgctatttaccaggctaaattcctgaaatatctggaacaccgtggcctgaaagatacctctaaacaaaccgtttacgcgttcctcggtgacggtgaaatggacgaaccggaatccaaaggtgcgatcaccatcgctacccgtgaaaaactggataacctggtcttcgttatcaactgtaacctgcagcgtcttgacggcccggtcaccggtaacggcaagatcatcaacgaactggaaggcatcttcgaaggtgctggctggaacgtgatcaaagtgatgtggggtagccgttgggatgaactgctgcgtaaggataccagcggtaaactgatccagctgatgaacgaaaccgttgacggcgactaccagaccttcaaatcgaaagatggtgcgtacgttcgtgaacacttcttcggtaaatatcctgaaaccgcagcactggttgcagactggactgacgagcagatctgggcactgaaccgtggtggtcacgatccgaagaaaatctacgctgcattcaagaaagcgcaggaaaccaaaggcaaagcgacagtaatccttgctcataccattaaaggttacggcatgggcgacgcggctgaaggtaaaaacatcgcgcaccaggttaagaaaatgaacatggacggtgtgcgtcatatccgcgaccgtttcaatgtgccggtgtctgatgcagatatcgaaaaactgccgtacatcaccttcccggaaggttctgaagagcatacctatctgcacgctcagcgtcagaaactgcacggttatctgccaagccgtcagccgaacttcaccgagaagcttgagctgccgagcctgcaagacttcggcgcgctgttggaagagcagagcaaagagatctctaccactatcgctttcgttcgtgctctgaacgtgatgctgaagaacaagtcgatcaaagatcgtctggtaccgatcatcgccgacgaagcgcgtactttcggtatggaaggtctgttccgtcagattggtatttacagcccgaacggtcagcagtacaccccgcaggaccgcgagcaggttgcttactataaagaagacgagaaaggtcagattctgcaggaagggatcaacgagctgggcgcaggttgttcctggctggcagcggcgacctcttacagcaccaacaatctgccgatgatcccgttctacatctattactcgatgttcggcttccagcgtattggcgatctgtgctgggcggctggcgaccagcaagcgcgtggcttcctgatcggcggtacttccggtcgtaccaccctgaacggcgaaggtctgcagcacgaagatggtcacagccacattcagtcgctgactatcccgaactgtatctcttacgacccggcttacgcttacgaagttgctgtcatcatgcatgacggtctggagcgtatgtacggtgaaaaacaagagaacgtttactactacatcactacgctgaacgaaaactaccacatgccggcaatgccggaaggtgctgaggaaggtatccgtaaaggtatctacaaactcgaaactattgaaggtagcaaaggtaaagttcagctgctcggctccggttctatcctgcgtcacgtccgtgaagcagctgagatcctggcgaaagattacggcgtaggttctgacgtttatagcgtgacctccttcaccgagctggcgcgtgatggtcaggattgtgaacgctggaacatgctgcacccgctggaaactccgcgcgttccgtatatcgctcaggtgatgaacgacgctccggcagtggcatctaccgactatatgaaactgttcgctgagcaggtccgtacttacgtaccggctgacgactaccgcgtactgggtactgatggcttcggtcgttccgacagccgtgagaacctgcgtcaccacttcgaagttgatgcttcttatgtcgtggttgcggcgctgggcgaactggctaaacgtggcgaaatcgataagaaagtggttgctgacgcaatcgccaaattcaacatcgatgcagataaagttaacccgcgtctggcgtaagaggtaaaagaataatggctatcgaaatcaaagtaccggacatcggggctgatgaagttgaaatcaccgagatcctggtcaaagtgggcgacaaagttgaagccgaacagtcgctgatcaccgtagaaggcgacaaagcctctatggaagttccgtctccgcaggcgggtatcgttaaagagatcaaagtctctgttggcgataaaacccagaccggcgcactgattatgattttcgattccgccgacggtgcagcagacgctgcacctgctcaggcagaagagaagaaagaagcagctccggcagcagcaccagcggctgcggcggcaaaagacgttaacgttccggatatcggcagcgacgaagttgaagtgaccgaaatcctggtgaaagttggcgataaagttgaagctgaacagtcgctgatcaccgtagaaggcgacaaggcttctatggaagttccggctccgtttgctggcaccgtgaaagagatcaaagtgaacgtgggtgacaaagtgtctaccggctcgctgattatggtcttcgaagtcgcgggtgaagcaggcgcggcagctccggccgctaaacaggaagcagctccggcagcggcccctgcaccagcggctggcgtgaaagaagttaacgttccggatatcggcggtgacgaagttgaagtgactgaagtgatggtgaaagtgggcgacaaagttgccgctgaacagtcactgatcaccgtagaaggcgacaaagcttctatggaagttccggcgccgtttgcaggcgtcgtgaaggaactgaaagtcaacgttggcgataaagtgaaaactggctcgctgattatgatcttcgaagttgaaggcgcagcgcctgcggcagctcctgcgaaacaggaagcggcagcgccggcaccggcagcaaaagctgaagccccggcagcagcaccagctgcgaaagcggaaggcaaatctgaatttgctgaaaacgacgcttatgttcacgcgactccgctgatccgccgtctggcacgcgagtttggtgttaaccttgcgaaagtgaagggcactggccgtaaaggtcgtatcctgcgcgaagacgttcaggcttacgtgaaagaagctatcaaacgtgcagaagcagctccggcagcgactggcggtggtatccctggcatgctgccgtggccgaaggtggacttcagcaagtttggtgaaatcgaagaagtggaactgggccgcatccagaaaatctctggtgcgaacctgagccgtaactgggtaatgatcccgcatgttactcacttcgacaaaaccgatatcaccgagttggaagcgttccgtaaacagcagaacgaagaagcggcgaaacgtaagctggatgtgaagatcaccccggttgtcttcatcatgaaagccgttgctgcagctcttgagcagatgcctcgcttcaatagttcgctgtcggaagacggtcagcgtctgaccctgaagaaatacatcaacatcggtgtggcggtggataccccgaacggtctggttgttccggtattcaaagacgtcaacaagaaaggcatcatcgagctgtctcgcgagctgatgactatttctaagaaagcgcgtgacggtaagctgactgcgggcgaaatgcagggcggttgcttcaccatctccagcatcggcggcctgggtactacccacttcgcgccgattgtgaacgcgccggaagtggctatcctcggcgtttccaagtccgcgatggagccggtgtggaatggtaaagagttcgtgccgcgtctgatgctgccgatttctctctccttcgaccaccgcgtgatcgacggtgctgatggtgcccgtttcattaccatcattaacaacacgctgtctgacattcgccgtctggtgatgtaagtaaaagagccggcccaacggccggcttttttctggtaatctcatgaatgtattgaggttattagcgaatagacaaatcggttgccgtttgttgtttaaaaattgttaacaattttgtaaaataccgacggatagaacgacccggtggtggttagggtattacttcacataccctatggatttctgggtgcagcaaggtagcaagcgccagaatccccaggagcttacataagtaagtgactggggtgagggcgtgaagctaacgccgctgcggcctgaaagacgacgggtatgaccgccggagataaatatatagaggtcatgatgagtactgaaatcaaaactcaggtcgtggtacttggggcaggccccgcaggttactccgctgccttccgttgcgctgatttaggtctggaaaccgtaatcgtagaacgttacaacacccttggcggtgtttgcctgaacgtcggctgtatcccttctaaagcactgctgcacgtagcaaaagttatcgaagaagccaaagcgctggctgaacacggtatcgtcttcggcgaaccgaaaaccgatatcgacaagattcgtacctggaaagagaaagtgatcaatcagctgaccggtggtctggctggtatggcgaaaggccgcaaagtcaaagtggtcaacggtctgggtaaattcaccggggctaacaccctggaagttgaaggtgagaacggcaaaaccgtgatcaacttcgacaacgcgatcattgcagcgggttctcgcccgatccaactgccgtttattccgcatgaagatccgcgtatctgggactccactgacgcgctggaactgaaagaagtaccagaacgcctgctggtaatgggtggcggtatcatcggtctggaaatgggcaccgtttaccacgcgctgggttcacagattgacgtggttgaaatgttcgaccaggttatcccggcagctgacaaagacatcgttaaagtcttcaccaagcgtatcagcaagaaattcaacctgatgctggaaaccaaagttaccgccgttgaagcgaaagaagacggcatttatgtgacgatggaaggcaaaaaagcacccgctgaaccgcagcgttacgacgccgtgctggtagcgattggtcgtgtgccgaacggtaaaaacctcgacgcaggcaaagcaggcgtggaagttgacgaccgtggtttcatccgcgttgacaaacagctgcgtaccaacgtaccgcacatctttgctatcggcgatatcgtcggtcaaccgatgctggcacacaaaggtgttcacgaaggtcacgttgccgctgaagttatcgccggtaagaaacactacttcgatccgaaagttatcccgtccatcgcctataccgaaccagaagttgcatgggtgggtctgactgagaaagaagcgaaagagaaaggcatcagctatgaaaccgccaccttcccgtgggctgcttctggtcgtgctatcgcttccgactgcgcagacggtatgaccaagctgattttcgacaaagaatctcaccgtgtgatcggtggtgcgattgtcggtactaacggcggcgagctgctgggtgaaatcggcctggcaatcgaaatgggttgtgatgctgaagacatcgcactgaccatccacgcgcacccgactctgcacgagtctgtgggcctggcggcagaagtgttcgaaggtagcattaccgacctgccgaacccgaaagcgaagaagaagtaatttttcgtttgccggaacatccggcaattaaaaaagcggctaaccacgccgctttttttacgtctgcaatttacctttccagtcttcttgctccacgttcagagagacgttcgcatactgctgaccgttgctcgttattcagcctgacagtatggttactgtcgtttagacgttgtgggcggctctcctgaactttctcccgaaaaacctgacgttgttcaggtgatgccgattgaacacgctggcgggcgttatcacgttgctgttgattcagtgggcgctgctgtactttttccttaaacacctggcgctgctctggtgatgcggactgaatacgctcacgcgctgcgtctcttcgctgctggttctgcgggttagtctgcattttctcgcgaaccgcctggcgctgctcaggcgaggcggactgaatgcgctcacgcgctgcctctcttcgctgctggatcttcgggttagtctgcattctctcgcgaactgcctggcgctgctcaggcgaggcggactgataacgctgacgagcggcgtccttttgttgctgggtcagtggttggcgacggctgaagtcgtggaagtcgtcatagctcccatagtgttcagcttcattaaaccgctgtgccgctgcctgacgttgggtatctcgtgtaatgactggtgcggcgtgtgttcgttgctgaaactgatttgctgccgcctgacgctggctgtcgcgcgttggggcaggtaattgcgtggcgctcattccgccgttgacatcggtttgatgaaaccgctttgccatatcctgatcatgatagggcacaccattacggtagtttggattgtgccgccatgccatattcttatcagtaagatgctcaccggtgatacggttgaaattgttgacgtcgatattgatgttgtcgccgttgtgttgccagccattaccgtcacgatgaccgccatcgtggtgatgataatcatcattgtcatgatgatgatggtcatgatcgtcgtcgtcccagtcgatgctgctgaatagtgcgtacgtggtagcaacgcccatgctatagccgaatccgcgtacaaagctgtcaacaaacggttctccggctggtggtggcagataaaccggcggatacgcagtattggcccagttcccgtaaaccacggttgggttgtagttgggaatatagaccacatcaggattggcgggctcaatggaaatgacggttgttgccggctctgtaatgacggggttggcagttaaaactgtattggatggtatgacgggtgccgtgactgtctgttttaccggtacagctttcttcgttgtggtaataactttctgttcggttgatgacttcagcgagccggtttgttgcgccagttgccgcaatcgctgtaccgagtccatcacgtcctgcggctgggccagaaaagcatcgcccaggttttgcacccattgcgggttttcgcccatcaatgccatcaattgtggaaaggccaccagtgatttaacgctggcgtcccacggctggtcagataccgcctgaatagcagcatcgccttgtttaagtggattatcgtgcgaccattgcactgcttgagcaacgtttgtcggataggttgatgccatcagcacctgcgaaagtagggcgtcgggatacagcgcgacgggcgcgacccattgatctatttgtgcagtgctgaatgcggatttgacgacggcgggtgttacgggaggtgcggaaaccgttgcaggaaacgtaaccgcggcagcgtcagacacagccagttgtgtcgattgcggttccacaggcgcttccactgtgcggctttttatatatagcccggtagaggcggcacaaagcccggcactgcaaattagcgccagcacatggggtttaaacggcaaagtcattttcataattcggatctcaaggaaatcgcaatggtcggcgaactgccacccgcaggtgctgtgaatccgagtataaagaggcggtagtttaaattttgactaatcttgggattcgttgagaaaggtgattatcaccatgcgaattaacgaagtttttacggagggaaacaatctctagaccatccttaacgattcagccacttttttatgttgcttttttgtaaacagattaacacctcgtcaaaatcctgctattctgcccgttgcggtactgggcatttaccctacaaactgctgtctcacaggagcgtgaagagaatcgcctgccgcactatgacaatgagagcgaggagaaccgtcgtgctagaagaataccgtaagcacgtagctgagcgtgccgctgaggggattgcgcccaaacccctggatgcaaaccaaatggccgcacttgtagagctgctgaaaaacccgcccgcgggcgaagaagaattcctgttagatctgttaaccaaccgtgttcccccaggcgtcgatgaagccgcctatgtcaaagcaggcttcctggctgctatcgcgaaaggcgaagccaaatcccctctgctgactccggaaaaagccatcgaactgctgggcaccatgcagggtggttacaacattcatccgctgatcgacgcgctggatgatgccaaactggcacctattgctgccaaagcactttctcacacgctgctgatgttcgataacttctatgacgtagaagagaaagcgaaagcaggcaacgaatatgcgaagcaggttatgcagtcctgggcggatgccgaatggttcctgaatcgcccggcgctggctgaaaaactgaccgttactgtcttcaaagtcactggcgaaactaacaccgatgacctttctccggcaccggatgcgtggtcacgcccggatatcccactgcacgcgctggcgatgctgaaaaacgcccgtgaaggtattgagccagaccagcctggtgttgttggtccgatcaagcaaatcgaagctctgcaacagaaaggtttcccgctggcgtacgtcggtgacgttgtgggtacgggttcttcgcgtaaatccgccactaactccgttctgtggtttatgggcgatgatattccacatgtgccgaacaaacgcggcggtggtttgtgcctcggcggtaaaattgcacccatcttctttaacacgatggaagacgcgggtgcactgccaatcgaagtcgacgtctctaacctgaacatgggcgacgtgattgacgtttacccgtacaaaggtgaagtgcgtaaccacgaaaccggcgaactgctggcgaccttcgaactgaaaaccgacgtgctgattgatgaagtgcgtgctggtggccgtattccgctgattatcgggcgtggcctgaccaccaaagcgcgtgaagcacttggtctgccgcacagtgatgtgttccgtcaggcgaaagatgtcgctgagagcgatcgcggcttctcgctggcgcaaaaaatggtaggccgtgcctgtggcgtgaaaggcattcgtccgggcgcgtactgtgaaccgaaaatgacttctgtaggttcccaggacaccaccggcccgatgacccgtgatgaactgaaagacctggcgtgcctgggcttctcggctgacctggtgatgcagtctttctgccacaccgcggcgtatccgaagccagttgacgtgaacacgcaccacacgctgccggacttcattatgaaccgtggcggtgtgtcgctgcgtccgggtgacggcgtcattcactcctggctgaaccgtatgctgctgccggataccgtcggtaccggtggtgactcccatacccgtttcccgatcggtatctctttcccggcgggttctggtctggtggcgtttgctgccgcaactggcgtaatgccgcttgatatgccggaatccgttctggtgcgcttcaaaggcaaaatgcagccgggcatcaccctgcgcgatctggtacacgctattccgctgtatgcgatcaaacaaggtctgctgaccgttgagaagaaaggcaagaaaaacatcttctctggccgcatcctggaaattgaaggtctgccggatctgaaagttgagcaggcctttgagctaaccgatgcgtccgccgagcgttctgccgctggttgtaccatcaagctgaacaaagaaccgatcatcgaatacctgaactctaacatcgtcctgctgaagtggatgatcgcggaaggttacggcgatcgtcgtaccctggaacgtcgtattcagggcatggaaaaatggctggcgaatcctgagctgctggaagccgatgcagatgcggaatacgcggcagtgatcgacatcgatctggcggatattaaagagccaatcctgtgtgctccgaacgacccggatgacgcgcgtccgctgtctgcggtacagggtgagaagatcgacgaagtgtttatcggttcctgcatgaccaacatcggtcacttccgtgctgcgggtaaactgctggatgcgcataaaggtcagttgccgacccgcctgtgggtggcaccgccaacccgtatggacgccgcacagttgaccgaagaaggctactacagcgtcttcggtaagagtggtgcgcgtatcgagatccctggctgttccctgtgtatgggtaaccaggcgcgtgtggcggacggtgcaacggtggtttccacctctacccgtaacttcccgaaccgtctgggtactggcgcgaatgtcttcctggcttctgcggaactggcggctgttgcggcgctgattggcaaactgccgacgccggaagagtaccagacctacgtggcgcaggtagataaaacagccgttgatacttaccgttatctgaacttcaaccagctttctcagtacaccgagaaagccgatggggtgattttccagactgcggtttaaaaagtcagcgcacgcgctgcgcataaacgacacaatgcccggttaatgagattcccgggcatttttttatttctaaaccatcgccgttccgctgtttttctccggtaaggctgcgataattacatcaatggcgcaatgcgatttcggtgcattgccgggagcagaggaacacactatggattacgaatttctgcgcgatattaccggagtggtaaaggtgcgtatgtccatggggcatgaagtggtcgggcactggtttaatgaagaggtgaaagaaaacctggccttgcttgatgaagtggaacaagcagcgcacgcactgaaaggtagcgaacggtcctggcaacgggcagggcatgaatacaccctgtggatggacggtgaagaggtgatggttcgcgccaatcaactggaattcgctggcgatgaaatggaagaggggatgaactactacgacgaagaaagcctgtcgctatgcggcgttgaggattttctgcaggtcgtggcggcttaccgcaatttcgtgcagcagaagtaaataaatctggcggagcctgggagctccgccagagccgttaaacagctggcatattgcgcccgtaataaatctcgcgcatttctttccacagcgcagcggtaatttcctggcgctcgctgtcggttaagtcttccggtttggtgtggaacatgtagtgcttaaggtcgaactctttaagcaacatcttggtatggaagatattttcctgatagacgttcacatccaccatgtcatacagcgccttcatatcgtcagacataaagttctgaatcgaattaatctcatggtcgataaagtgcttcataccgttaatgtcgcgggtaaaaccgcgcacgcgataatcaatggttacgatatcggactcaagctggtggatcaggtaattcagcgccttcagcggagaaatcacgccgcaggtagagacttcaatatcggcgcggaaggtacataaaccgccttcaggatgactttccgggtaggtatgtacgcaaatatgacttttatcaagatgggcaacgaccgtttctggcagtgggccggggtgttctgttttgtcgatgagtttcgggtcaaccggttcttcactcaccagaatagtgacgctggcaccctgtggttcgtaatcctggcgggcgatgttaagaatattagccccgataatggaacaggtttctgacaggatttcggtcagacggttggcattatagagttcatcgatataagcaatataaccgtcgcgctcttcggcagttttggcgtagcagatatcgtaaatacaaaaactcagacttttggtcagattattaaagccatgcagtttcagttttttcaatttcttatcttctccttaggacggctgtgaagccagtgcgtcttgcagatactgaggtaaggcaaaagctgccgtatggattgccggattgtaataacggcatttcaggccagaggcgagaaaacgcgcctgaataatttcggttgagagatggcgtaaggcgtcgttatctgtcgcccatgcaaaagtcatgataccgccgtaataggtcgggatcgccgcctgataaaagccaacgtcgctgaagtaatggctgagtttgcgatggctgtcgatggcttcttcctgctgtaaaaagcagacgccgttttgtgcgacgaagataccgccaggattcaggcaacgtttgcagccttcataaaatgccgaagtgaaaaggctttcgccgggaccgataggatcggtgcagtcggagataatgacatcaaaggtctggctggtttgattaacgaaattgacgccatcgtcgatcaccagcttaaagcgcggatcgtcgtagctaccggcgttatggttgggtagatactgacggcagaacgatacgacacccgcatcgatttccaccatcgtgattgactcaacgtttttatgtcgggttacttcacgcagcatggcaccgtcgccgccgccgataatcagcacatgtttcgcgtgaccatgggccagtagcggaacatgggtcatcatctcatgatagataaactcgtcgcgctcggtggtttgtactacgccatccagcgccattacgcgaccaaatgcagcgttctcaaaaatgatcagatcctggtgatcggtcttttcatgatacagaacgttatctaccgcaaagtactgcccaaactggtcgtgtagcgtttcatgccactgttttttttcggccatgggttgatacctcctttgttaacacccgtaaaaaaagggcgcaacataatagctaacattgaccgcggatgcacggtcaatatttctacaaaaaggtatcagggattatttgacgtaggcaagcaggcttaaggaatcgcgggccagggctttgcattttttagcgacgggaatgccaatgccgctgagatcgcggtagctgtcttcaccgagggctttcatgtcgaaggtgtcgtaattactgaggtcccactggttttgctgagcgaaaaagaccagtgcgcgacgaatttgcccgttaggtaagttctggtaaccacaatcgttcttcagaaagacaaaaactgccgttaaatcggccatatcttcggcttcagactcgctgagcgcgtaactgtttgcgcagacggccatcaggctgccgaataacactgttctgaaaaacgtcttcattgcttctaccaggggcttaaagaagataaacgttagcacactgcgagcgaggcgacgaccattattgtcgattaaattgtgtctgcggcttgaccttcccgtaaggggaaggactatgctcaacgtttgattttgtttcgcctgcttaagaataaggaaataactatgcaacgtcgtgatttcttaaaatattccgtcgcgctgggtgtggcttcggctttgccgctgtggagccgcgcagtatttgcggcagaacgcccaacgttaccgatccctgatttgctcacgaccgatgcccgtaatcgcattcagttaactattggcgcaggccagtccacctttggcgggaaaactgcaactacctggggctataacggcaatctgctggggccggcggtgaaattacagcgcggcaaagcggtaacggttgatatctacaaccaactgacggaagagacaacgttgcactggcacgggctggaagtaccgggtgaagtcgacggcggcccgcagggaattattccgccaggtggcaagcgctcggtgacgttgaacgttgatcaacctgccgctacctgctggttccatccgcatcagcacggcaaaaccgggcgacaggtggcgatggggctggctgggctggtggtgattgaagatgacgagatcctgaaattaatgctgccaaaacagtggggtatcgatgatgttccggtgatcgttcaggataagaaatttagcgccgacgggcagattgattatcaactggatgtgatgaccgccgccgtgggctggtttggcgatacgttgctgaccaacggtgcaatctacccgcaacacgctgccccgcgtggttggctgcgcctgcgtttgctcaatggctgtaatgcccgttcgctcaatttcgccaccagcgacaatcgcccgctgtatgtgattgccagcgacggtggtctgctacctgaaccagtgaaggtgagcgaactgccggtgctgatgggcgagcgttttgaagtgctggtggaggttaacgataacaaaccctttgacctggtgacgctgccggtcagccagatggggatggcgattgcgccgtttgataagcctcatccggtaatgcggattcagccgattgctattagtgcctccggtgctttgccagacacattaagtagcctgcctgcgttaccttcgctggaagggctgacggtacgcaagctgcaactctctatggacccgatgctcgatatgatggggatgcagatgctaatggagaaatatggcgatcaggcgatggccgggatggatcacagccagatgatgggccatatggggcacggcaatatgaatcatatgaaccacggcgggaagttcgatttccaccatgccaacaaaatcaacggtcaggcgtttgatatgaacaagccgatgtttgcggcggcgaaagggcaatacgaacgttgggttatctctggcgtgggcgacatgatgctgcatccgttccatatccacggcacgcagttccgtatcttgtcagaaaatggcaaaccgccagcggctcatcgcgcgggctggaaagataccgttaaggtagaaggtaatgtcagcgaagtgctggtgaagtttaatcacgatgcaccgaaagaacatgcttatatggcgcactgccatctgctggagcatgaagatacggggatgatgttagggtttacggtataaaaagaccgtattcggaaatatgcccggatctctccgggcattaaactgatgacaaacgcaaatctgcctgatgcgctacgcttatcaggcctacgctagctgtgcaatccattgattttgcacaattttgtaggctggataaggcgttcacgccgcatccggcatgaacaacgcgcacgttgtcagcaatctgagcaagtcttacttcacatcatccggcagcgcataagccacaatatagtcgcccatcttcgtaccaaatgaaccgtgaccgcctgcggagatcaccacatactgcttaccattcacttcataggtcattggcgtagcctgaccacccgctggtaaacgaccctgccacagtttttcaccgttgctcatgttgtaagcgcgcaggtagttatctgccgtagcggcgataaacagcacgttacccgccgtggagattggcccgcccagcatcggcatacccatattgaacggcaccggaaccggcatcgggaacggcatactgtcctgcggcgtaccaatacgtttcttccacaccacttcattagttttcagatccagcgccgagatataaccccatgctggctgtttacatggcagaccaaatggtgagaggaacgggttgagcgtgacaccatacggtacaccgtactgtggctgaatgccggattccgtacccgtgcctttggcatctttcggctgctccatcgggttgccaggaccacgcgggatcagtttcgaaacaaacggcagtgccattgggttggcaatcgccacttcacgatttggatcaacggaaatcccgccccattcgaacatccccaggttacccgggaagaccagcgtaccctgttcagatggcggggtgaaaatgccttcatagcgcatctggtggaacatcacgcggcacaccagttggtcaaacatggtggctccccacatatccgcaccgctcaaatctttcgtcggacggaagctcagttcagaaaacggttgagttggggttacgtaatcgcctttcgctgcaccttggggaaccggtttttccggtgccggaaccaccagttcgccattacgacgatcgagcacaaaaatgttgccggttttcgccggagcgtaaataactggcactttctgaccattaacggtgatgtccgccagcgtcggctgtgccggaagatccatgtcccacaggtcgtggtgaacggtctggtagctccacgccagtttcccggtagtggcattcagcgccagaatcgagctggcataacgttcctgttccggtgtgcggttaccgccccagatatccggcgtggtcacgcccatcggcagatagaccagatccagcttcgcgtcataggccgctggtgcccaggagtttggcgagttaaaggtaaaggtgtgttcgtcagacgggattgcgttcggatctttcgcgccgggatcaaaagcccacagcagctccccggtgttgacatcaaaaccacggatcacgccagacgtttcgcgggttgagaagttatcggtaactgaaccggccatcacgatggttttatcggtgataatcggtggcgaagtcggttcatacagacccggtttggtgtctggcatattgctttgcagattgagcacgcctttattggcgaaggtttcgcacagtttgccgttttcagcgttaatcgcaatcagtcgaccatcattgaccggaagaatgatacgacgcgggcaatccgccatcacttccggcgaagcggtttctgctttggcttcatgataagagacaccacggcaggttacgtgctggaaagactcgttggttttcagctcaggatcgtaatgccatttctctttgccgctggcggcatcaagcgcaaacaggcgctggtgagcggtacacaggtaaagggtgtcgcccactttaatcggcgtcacttcattggtgatttcacccggatcgttcggctgcttcacatcgccagtacggaacacccaggcttctttcagattatggacgttatcggcgttaatttgtttcagcggcgaaaagcgttgaccttcctgattacgaccataggcaggccagtcctgatcggctacgggggagatagcttcagcaggtgtggcatcggcgcttaaggtgccgttgatctcctgcggatcgttaaatccggcccaggtcaggataccaccgctaatcagcagtgcgaccaccagtgcggcaactgcgccgctggcaggaatgaccaggcgacgccagacaaacggcaggatcagccagatgccgaagaagaccagaatgtcgctgcgcggagtcagcgcccagaagtcgaaaccaacttcccagacgccccaaatcatggtgccgagcagcagggctgcgtatagccaaagcgcggcgcgtttactgcgccacagcatccaggcgacgccgagcatcacaaggccagcgatagggtagtaccaggagccgccaatcgcgaccagccagcctccgccaatgagtagatacagcccgcaaagcgctgcaaaaagggctgttagcgtgacgagtaatcgtcgcgagcctgtattgttaattgccataaagagacaccatttcaattcattaatattttagtagcaattaattataggttttaacatgtgtgatcgtcatcacaattcgagctttattaacagattccgcgaatgaatagttttactggtatactgcgtgtcttgcgctttgttgcggtgccaaaacctgcccgtgcgaagtgatttgtttttaaatcatatggttagagatatgaaacatactgtagaagtaatgatccccgaagcggagattaaagcgcgtatcgccgaactgggtcgtcagattactgagcgttacaaagacagcggcagcgatatggtgctggtgggtctgctgcgtggctcatttatgtttatggcggacctgtgccgtgaagttcaggtatctcatgaagtcgactttatgaccgcctccagctacggtagcggcatgtccaccacccgtgatgtgaaaatcctcaaagatctggatgaagatatccgtggcaaggacgtgctgattgttgaagatatcatcgactcggggaatacactgtcgaaagtgcgtgagatcttaagcctgcgcgaaccgaagtcgctggcgatttgtacgctgctggataaaccgtcccgtcgtgaagtgaacgtcccggtagaatttatcggtttctcgatcccggatgagtttgtggtgggttacggcattgattacgcacagcgttaccgtcatctgccgtatatcggcaaagtgattctgctggacgagtaagtgtgaagttgccggatgtgttgcatccggcatggcatttttatttgtggttggcgtgtttcagcttgaggttggaaatcccgtgacggtaacgttgctcaagggtttcgcggttggtggcggtaacatccagatcacgcagcaagccgtcgtgaatgccgtaggcccagccgtgaatggtaactttctgcccgcgtttccacgctgattgcataatggtggagtggcccaggttatacacctgttccatgacgttcagttcacacaaggtatccagacggcgctcttgcggcatttcgccgagcaatgagctatgtttgaaccagatatcgcggatatgcagcagccagttgttgataagccccagttccgggttttcaactgcggcttgtacgccgccgcaaccgtagtggccacagataataatgtgttcaacttcgagtacatccactgcatactgaaccacggaaaggcagttcaggtcagtgtgaatgaccaggttagcaacattacggtgaacaaagagttcgcccggctcaagaccggttaaacgttctgcaggaacgcgactgtcggaacatccaatccatagaaagcgcggtttttgcgcttgtgccagtttctcaaaaaacccgggatcctcttccaccagcatttttgaccatagtgcattgttgctgatgagtgtatctatgtctttcatggaggttaacgacctgtaaccaaataattacgtttggctaatatagggcaactccgggacgatttaaaccacagataaagtgtaagaacgtaaggtaagtaaaaatttatgaccattgcactggaacttcaacagcttaaaaaaacctatccaggcggcgttcaggcgcttcgtgggatagatttgcaggtcgaagcgggtgatttttatgcgcttctcgggccgaacggggccgggaaatcgaccactatcggtattatcagctctctggtaaataaaacctccgggcgggtcagcgtatttggttacgatctcgagaaggatgtcgtgaacgctaaacgtcagttgggactggtgccgcaggaatttaacttcaacccgtttgaaaccgtgcagcaaattgtggtgaatcaggcagggtactacggcgtggagcgcaaagaagcgtacatccgcagcgaaaagtatcttaaacaactcgatctatggggaaaacgcaacgaacgtgcgcgtatgttatctggcgggatgaagcgccgtttaatgattgcccgtgcgttaatgcatgaacctaaactactgattctcgacgaaccgaccgcaggcgtggatattgaacttcgccgctcaatgtggggctttttgaaggatttaaacgacaaaggcaccaccatcattctcaccacacactacctggaagaagcagaaatgctgtgccgcaatatcggcattattcaacacggtgagctggtggaaaatacctcgatgaaggcgctgctggcgaagctgaaatcggaaacctttattctcgatctcgcaccgaaaagcccgttaccgaagctcgatggctatcagtatcgactggtcgataccgcgacgctggaagttgaagtgctgcgtgagcaggggatcaacagcgtatttacgcagttaagtgagcagggcattcaggtattaagtatgcgtaacaaagctaaccgtctggaagagctgtttgtttcactggttaatgaaaaacaaggagatcgcgcatgatgcatctttactgggtggcgctaaaaagcatctgggcgaaagagatccatcgctttatgcgtatctgggtgcagacgctggtgccgccagtcatcaccatgaccctttactttattatcttcggtaacctgattggttcgcgtattggcgatatgcatggcttcagctatatgcagttcatcgtaccggggctgatcatgatgtcggtgatcaccaatgcctacgccaacgttgcgtcatcattttttggtgccaagttccagcgtaatattgaagagctgctggtagcgccggttccgactcacgtcattattgccggatatgtcggcggtggcgtggcgcgtggtctgtttgttggcattctggtgacggcaatttcactgttttttgtgccatttcaggtgcattcgtgggtattcgttgccttaacgctggtgctcacggcggtgttgttctcccttgcgggtttgctgaacggtgtgtttgccaaaacgttcgatgacatcagcctggtgccaacctttgtgttaacgccactcacgtatttgggcggggtcttttactcactgactttgttgccgccgttctggcaagggctgtcgcacctgaacccaatcgtttatatgatcagtggtttccgctacggcttcctcggtatcaatgatgttccgctggtcactacctttggcgtactggtggtctttattgtggcgttttatttgatctgttggtcgctgatccaacgtggacgtggtttgcgtagctaaggctatttcctctcctctggatttgggggagaggagttttgacggctatcaccctttatcaacaatggtcagggtagactgattttcggctaaggaggaaggcgatgttaggttgggtaattacctgtcacgatgaccgggcgcaagagatactggatgcgctggagaaaaaacatggggcacttcttcagtgccgggccgtgaatttctggcgcggattaagctctaatatgctcagccgcatgatgtgcgatgctctgcatgaagcggactctggtgagggtgtcatcttcttaaccgatatagccggagcgccaccgtatcgcgtggcttcattattaagccacaaacactcccgttgcgaagtgatttctggtgtcacgttaccgttaattgaacagatgatggcttgccgtgaaaccatgaccagttcagagtttcgcgagcgtattgtcgaactgggtgcgccggaggtgagtagtctttggcaccaacaacaaaaaaatccgcctttcgtcctcaaacataatttgtatgagtattaacccgcgattctgatggcgcttttgctacaataaaagcgttgtttcaccctcggttattttttcatgtacaaacaagctgttattctcctgctgatgctgtttaccgcaagtgtcagtgccgcgttacctgcccgttatatgcaaaccatcgaaaatgctgcggtctgggcgcaaattggtgacaagatggtgaccgtggggaatattcgggccggacaaatcattgccgtggagcccactgccgcaagttattacgcatttaattttggctttggcaaaggttttatcgataaaggtcatctcgagccggttcaggggcgacaaaaagttgaagacggtttgggcgacctcaacaagccgctgagtaatcagaacttagttacctggaaagatacgccggtctataacgcgccgagtgcgggaagtgcgccatttggggtactggcggacaatttgcgctacccgattttgcataaactgaaagacaggttaaatcaaacctggtatcagatccgtattggcgatcgactggcctatatcagcgcactggatgcccaacccgataatggcctgtcggtgctaacctatcaccatattctgcgcgacgaagaaaacacccgttttcgccatacttcgacgaccacatcggtacgcgctttcaataaccagatggcctggctgcgtgacaggggatacgcgacactgagcatggtgcagctggaaggctacgtgaagaataagatcaatctccctgcgcgagcggtggtgattacctttgatgatggcctcaagtcggtgagccgctatgcgtatcctgtgttgaaacaatatggcatgaaggcgacggcgtttattgttacctcacgcatcaaacgtcacccgcagaagtggaacccaaaatcgctgcaatttatgagcgtttctgagcttaacgaaattcgcgatgtatttgatttccagtcacatacccattttttgcatcgggtagatggttatcgccgacccatattactgagccgtagtgagcacaatattctgtttgattttgcacgttcacgccgcgctctggcgcaatttaatccgcatgtctggtatctttcgtatccgtttggcggatttaatgacaacgccgtgaaggcagcaaacgatgccggatttcacctggcggtgacaaccatgaaaggcaaagtaaaaccgggggataatccgttgttactaaaacgactttatatcttaagaacggattcgctggagacgatgtcgcggctggtgagtaaccagccgcagggataacaatcaagcaacctgtaccggaatcgctttcgcggtacgtttcatttcattgtcgccttcaaaataggcgacgttgggtcgccaggtgcgagcttcttcatctggcatggtaacgaagctggcgatgatgacaatatcgccgacactggcgcagtgggccgccgcaccgttaacagaaataattctcgaaccgcgttctgccgcgatggcataagtggagaaacgcttgccgttggtgacattccagatatcaatggcttcgttttcgagaataccggctgcgtcaagaaaatcctggtcaatggcgcaagaaccttcatagtgcaggtccgcatgagtcactttcacgcggtggagtttgccctgcagcatcgtgcgaatcataacttctacctttctaccctgtcgttaacgaagcaggcgatgcctgctttgaggaaattctcacgcagtattgcccgatttttgtttagtgtctactcatctgacggcatttgcgtcagcagtttgcgtaccgcgccgaagcgtgccatgtatcgcctgtaacgaattgatatttctctgaacgctgctcggtaaacaataaagaggtggctgacgatagcgcgccttgactggatactgccttcacgcaaagccacacggaagacagggaagatggatgcaccgagtaccacaccgcatgacgcggtatttaaacaatttttaatgcatgcggagacggctcgcgactttctggagatacatttgccagtggaattacgcgaactttgtgacctcaacacgcttcatttagagtcggggagtttcattgaagagagcctgaaaggacacagcacggacgtgctctattccgtgcaaatgcagggcaatcccggttatctgcatgttgtgattgaacaccaaagcaagccggataagaaaatggcctttcgcatgatgcgttattctatagccgccatgcaccggcatctggaggctgaccacgataagctgccgctggtggtgccgatactgttttatcagggcgaggccacaccttatccgctatcaatgtgctggtttgatatgttttactcgccggagctggcgcgacgcgtctataacagtcctttcccgctggtggatatcaccatcacaccggatgacgaaatcatgcaacatcggcggattgcgattctcgaactactgcaaaaacatattcgccagcgcgacttaatgttattgcttgagcaactggtcacgctgatcgacgaagggtacactagcggaagtcagttagttgccatgcaaaactatatgctgcaacgcggtcatactgaacaagcggatttgttttacggtgtgttgagagacagggaaacgggaggggagtctatgatgacgctggcgcagtggtttgaagagaaagggattgagaaggggattcagcagggaagacaggaagtaagtcaggaattcgcccagcgtcttctgagtaaaggaatgtctcgggaagacgttgcagagatggcaaatttacctcttgctgagattgataaggtaattaaccttatttaagttacctgtgttatgacagatgacgtggggtaaattaataactggcgccatcagccgtagcgccagttaagtattacgccagctcgaccattttgttgtcgatcaggcgagcatcgccaagccaggcggctaccagaattactgcccgtttgctggtttcagaaacttccagcaatgtgtcggcatcgcgaatctgaatatcatcggcgcggaagcctttttcattcagttcttgccccgcaatggtaataatttcatcgagatcccgttccccagcctgcaatttgtcagcaatcgaacttaaaactttgtacagaccaggcgcaattttgcgttgttccgccgtcagataaccgttacgggaacttagcgccagaccgtctttggcgcgcataattggcacaccgacaatctcaatatcgaagcccatatcggcaaccattttgcggatcagcgccagttgctgaaaatctttttcaccgaagcaggcgatgtccggctggaccaggttgaacagcttgctgacaatagtcgaaacgccgcgaaaatgtcccggacggctggcaccttccagcatggtcgaaaggccaggaacgtcaacgtaagtgtgggtttcagtaccgttcgggtagatctcttttaccgaaggggcgaaaactaaatccactttacgtttgtttagcttctcgcagtcctcctgcaaggtccgtggataacgagccagatcttccgggcggtcgaactgcatcgggttaacgaaaatactgacgacgaccacatcggcgcgggctttggcttcgtcgaccagcttcatatggccatcgtgcaggttacccatggtaggcaccagcgccacgcgcttgccttccatacgcaggcggcgaatttgctgacgcagcagcggcagggtttcgataattaacacaacgtgactccttaatggaaactgtgttcttcgcccggataaacgccggactccacttcagccatatactgccgcacagccgcgcggatgtcgcccgtttcggcgaggaaatttttagcgaatttaggaatgtgaccgccggtaataccaaaggcgtcgtgcatcacgaggatctgcccgtcagtgacgttgcctgcgccaatgccaataaccgggatcgccagtgcttcggtaatacgttttgccagttcaaccggcacgcattccagcaccagcagctgtgccccagcagcttctaaggctaatgcatcgctgagcagttgatcgcccgcttcatcgccgcgcccctgaactttgtagccaccgaaaatattcactgactgtggtgttaaacctaagtgaccacatacaggaacggcacgttcggtcagcatttgtacggtttctaccagccactcaccgccttcaattttgaccatgttagcaccggcacgcataaccgttgcggcgttttcgaaggcttgttccggcgtggcatacgccataaacggcaggtcagccagcagcaggcagtttggtgcgccgcgacgtacggcggcagtgtggtaggcgatatcggcaacggtaactggcagggtggagtcgtgcccctgaaccgtcatgcccagcgaatcgcccaccagcatgacgttaagcccttcatcagcaaagagtttggcgaagctatagtcataagcggtgatggtcgcgaaacgttttttttcctgtttgtacttctgcagtaaggagatggtggtcggtttcataacgtatcctgataaattgatgttgtgctgtctggcattttatcagtcacattggtgggggcaatgatttatccgtagcagcactgccagaaggtgacagtgctgctacgttatcagggataggttacctggaaagtactggtggctttaaattcgccgggttcgatagcaatattcccgtcttgctttaatgttgcctggaaatgaagaggctgtgatgtgccgttaccttgattagggtaaaccccatcggaggtgtcatcttcggtttcataatctatataaacagaattcgtatcattaggttttaatgtcattagcggatttttactggttgctaaaccttcaatgagtacgccaacgcctttggcggcagtgcttccagtaagcgtattaccaagcagttgtgtgttttgagtacctacttttccagtgacgagttttgtttcaatattacgcacacgaatacaattctgaagcgagatatcaaagggaacaggtgaagcgccatttttaattgtcccagagctatattctcccattctaaccgttgaaccattgactgatggcccggtaagtatggaggtaaaacatgttggtaaggttaatttgacattattcagtgtgaaattgacataaatgtggttgctgtgatctacaacttttgtaccaggactgtaggccttaaacgaataaaggtaatttgatgaactggataactggacttgctgattaagtgtaggatcgaaattagtatctgtataaaattcaacagttatgttgtgtactataccaccaatagcccaaaacttatcgtagtcgtctgctttgttgcaacccttagtttgtagatcgctgtctgtgacggaaaagaaaaattcttggttggaaggatctccgatatagattcctggcgattgaatgtcagttattgtatcgtatgcagaccagacccttgatattaacatggtgtaatacagaccaggaacagatgtattaaatagtttatgtccgccataatctttacctgaatagaccatggcattttcaatagttattggaccaggattcgctctgccagatgtattgcagtaaagaataccaccaccggtacctgtatccaggtatgaccagtacatttttaccccagtcgggccgagctgcgtgggtttataaaaaaccaagttgcttgctgttgatgtgtaattaaaggtcatctgtgcggcagtggaggggcctcgatagttatcaactcctgcattatttcccacaataaaacttgtatatgcactgactgtattacaacaagaatacagtgctaaaaaaagaatgtacctgaagatagtcttcatttttactccaatgtttctttattgttatggtttgcgctgtttttgtttgttattcgtagtaaatatccactaacacatggctcataagttgaccagatgtaacactcaatgcaggatcgattttttgcattcgggtgctaaatttccaggatgaaccattcatgtcatccgacattactggataaacggaacgagatccgcctgaagcattaagaacattgaatgtattcgccgaatcctgagtagaaaatataactactcctacattacttgctcctgacgaaatttcattagcaaatatttgcctagagccagcagccatgacaccgctaagggctctaaaatcaatatgtaactgatttagcacatcgccagttccctgtaatgcacagtcggatacagtgatagtgaactcttttccacctggttgataactttcaggagtaacattacctgaaaaatatcccaccccaacgacgccaagatcaatattaccctggttactgattccgcttttgcaggtgctgttttttacattggcaacaaggtcaatatcctgtccagcaatggctggacaggcgatgcaaaacagtaatgacagaaacagaattattctcttcatcagcttacgttgagtgggatgcatatatagttcctgaatctgtaagtctgttagttataggttactgtaaatgtggctggtgcagaaaacttacccgcagtgacattgtttacggttttatttttttccacgaccaggcgtgcactcatcggataataaacgaccgcattggctgcagtggagattgttacctcttgtgatgctggtgttacacagctaaattgtgttgcactccctgttgccggagttacagtgctccagacttcaacggcgacagcacttgctttatctgcggctgtggaaccatttgcaaaccccgcaccgtcattagcagttccctcgcatgtggctcgcttggttaattttatttgcgcttttttattggggatacccgcacagtctttgaatttgagtttgaatgtttttactttggtcttggcattgatttcagaaatatatacatcaccaaaatcaacaacagaaatgtcctgatcagagtcatttactaatgtagcggtacaagtacccatttctacagtagtaataacggtcagtccaatactgtctgttgccgcataagagagtacgctgaacaatgaggcagccaaaacgacactgctggataatccataacgtaaatttttaaatgtcatcataattatccttcttattgatagatgaaattaaacgtcgccagtgcacgaaaattccccggtacgccttgccctgcatctgtttcacgtagcgcaacggtcatttcaagacccttatcgggctgcatctcgtctgtgctccagcgtatcttttccgcactgttaggtttaaggaaagtggcatcatcagtagtccgttttttgaaacccataccgatattacttgtcgtcgaagatgaatcaccagactgcggtataataagcttaggtgagcttgatgatgcatttccggtcagagtggtatcaatccaactgatgccactgctgcacccactggcaaccagtttaaaatcagcctgagattctgtcgttttattcgcgatcttatccagacccatcttagggattctcaatgtgtagttattattgccatcattcgtgacgttattaccagtaagtgtgatgttacaggttgtcgctttgacagtggctgtaaactctacattaatatccgttgcaaatactgagggtgataataatattcccatcagtatcactattttatgtggcgttgtttttatcatttgacgtcccttgtagttactgaatctgacaccgaattccattcagaataatagattgtgctattttttctgcttctgggctttgttgataatgcgcaagacaacttacgggtttactttgttcgagccatttaatgctgatatttccctgctgctcaataccacgaacaaatgcttgtccaccctgtccaacattaccaatgacattgccttgctcatcataaatatctgcagcaaatggaatatttttaccatcacttcgtgtgatgttcataatggctgattgcccttgcacggtttcaaaatcagcaaagacgactgaaccctgacgcggtacagctactgcactggtactttttaattcaacatcgttctcaagatcgttgatatccagcgcgatacggttttcatgataaggagaaagagcgctggtgacaccataaccccatcgatcgatagtactgttgccataatttattcgcgctccttgagcacctggagcctgaactaccgccagtgtatcggagtcgctaaaactatcattactgaaagtcagtccaccgctatgcaatacaaaaccaccgtcggtgctgagagaaacttgacggctgttatcgctatttgcagaaattgaacctgccagcgttccccatggtgactcatagctggcataacccccaacataactcaaatctttgctggctttattcatcgtatagccagtattcacgctataactgacgcgagcgttatcgctatagccactgctgctaacgttgagttggttattacccttaaagtcactgcttatttgagtatcaatactctggaaacctgaagtacgttgttcagtgccaagtaatttttcaattggaatggtgaaactaagataaacgctatcgtcagtgtcgccgtcttcattccatgaacgctgggcactgacactgtagctgccccaggatgtactgttactgtagccaatagagtaattgctacgattttgtccggaagcccagtaatcggaccaacttccggaaagataaaatgaaccgtaatcttttttctcaaatttcaacggttggttaatactgaccgtaacctgatttttcatgcgtgagtaattacgcatggatttcggttcaagatcttgttcgggatgtttcacttcatcaattagagttagtgcatcattaagaccaaggtaattctgtgtcgaatagcgataggccgcgatattcagtgaagtacttgtttcttcgaataacttgttccaggaaacacgataactttgcccctggtatgttttatcatccgggatacgaacattggaatgagtcacatcgaaagaaaatgcaccaactgaagtattcagaccaagacctaacaaaccagcggtatagttattatcggttatctgaataccggtataacccgtcagatagttattcaggccgtagtagtagcttgcttgaaataaattaggctcatcctgaatatcatcttttaagacctgaccgccgctaatatcccaacgtccaacgccagggcgtaacatttgaacaacggatgagaaaggttgcgagaatgtccgctttgagccatcggattcttcgatggtaacaataagatcgctgccgtaccctgacggactcagatcatcaatgacgaaagcgcctggcggcaccgtcgtttcataaatcttatagccaccttgcgtaatagtgactttggcgttggtattggcaacgccatgaatgataggcgcaaagctggctaaagtcggaggcaacatgcggctgtcactgtataaacgaatgcctcggatactgacggaatcaaaggtttcgcccgtcgtataagactcaccaagaatgagttgagaacgcagcgaggcgatatcacgctgaacataccgattcttaaaatcataattactgccagaatcggtcatccagttgtagttgcccgaggcacgcagtcgccatgcacctaaattcatcccaccgttaaatgcagcataaatgctttcattttttcgaccaggggtttcactatgatatccgttgaggttgtatgacaacatggccgcattaatgccgttttcccataacgatggatcaacatagttttggtaatttttcattacccaggcttgaggaacgtctatatccagacgttgatcgttaacgtcataacgaacagaagcctgagggataatttccgtcaaattgaggcaattgccgagcgtttcatccctggcaagcagaacggctttttcgttatttatatcgggagaattaatatgaaactgcaataaattctttaatgtgatacaagcctgggcgttcttttttccttcaattgcgacaaatgtaatactttggttaatgattggttggtcgtttacataaacactgacgtcgtaaacacccggtatagcggggttaccttcactgtaccggctgagatcaatattagatgcattctgccccatcaggaaggtatggtcatattcaacgagttcagcactgaaagcagtattgcaatacagcagcgcgcaaaacgtggcgatacgggtcagatgatgataatttttagtatattctatagtcacgctatgcttcctgcggaattatatccttgcctgattacagcctggcattaccttcaattgcgccaccaaagtcattaatggcgtaaaaatgcacttttgcagaattcgctttgccattaaggccattgactttcatgacctcatcactaaatggtgcaatcattttcacatcaatcggatagcgtttaccgctagcttctaaatcaccactgctaaaagagacgtagtaaggggttggattggtcactcgtaatgacgccttaccttctgaacctgaccagaaccacttcagggctaacggggcttcagagggatttcccttcaatccatccgggcgatagaaaagttttatacgtgtgcgaaatgccagttgcagcaggctttgattcgcgaccttttctgcatctggttttggtggaacttccagtacgttaaaccagaacacgctctctctgtctttaggcagtgaggtgctggctgtgtacattaatttgattgtttgcccacgtttggcatcaatacgcgatactggcggcgtagcagtaaaagggactgtaatactgccaggctcagcgttgtcatcgccagtatctaaccaactctggacaagcaacgggttattccctttattttccagacgtacgttgacacttttttgatcgcttttatatattacgcgagtacccgaaatgacaatgtccgcaatagacgatgaactaaaagccatacaggttacgaagcataaagctgttgtatgtttggtgttaaaaaacataaaccatccctgatagagttaattaaaacagggaataatataaaatagaaattattattccctgtatattcattcaatcaatttaactggtgaatacttactgataagtaatggtgtatgcagtgttagtttttacataaccagcagttgctgtttggtctgcgacggcacgaacgtaagacgctttaaaatcataaacagcagattttgtcgttgcatccagggctttagtatacacatcgccagggttgttaatttgaacctgtttgatagtggaaccatcaatattgtgtagagcgatattaacgccgtcagatgggttgttaatagacatgtcgttgttcaaagtccctttgctgttaccaaagaaaacagaaccgaaggtcattttagccgtgctacctggattcggatttgctttgctgcagtcaacggtgatgctgaaaggtttagctttagcgccaacggtgtcattcagtacgccagcatcgatttcaccaacggttgcggtttgcagcaggatcagaccatccttgttaccgccgtcaacgcgggtttcacaggtgttatcaacaaccagaccactgatatttaactgaccgccgtccatatcagcagaagcagtacctgcaaccatcgccagcataagaccagacagggcaaaacctaattttttagacataaaaatcctttaataaaattccattagtcagactacatgtttgaagaatgactattcatgacacaaataggagaaacaaatgttagatattaatgagcaatgatatttgttacccaaatttacaaccattgttcattaggtcgcctattgtgcactttagaagcttttgaacaaattaaatttacttaattcaaaattaagtaaaaataagttcacaagtgcaattggttagggtatggagatgggattgatatttatttataggaagttatattatttccgcaaagagatgtttaaactaaaatcgtaattaaggaaagagatgagatatgattttcagaaaatatttatattcgcaatataaataaattaccatttgtttaatttgtcaaatgctcttgtatgtaagatttgacgcaacatctccccatcaggaaacaccaactccggcgcgatttcaaacagcggccacagcataaatccacgattcttcatatcgtagtgcggaacggtcaggcgttcagtatttatcacttcattaccaaacagcatgatgtcgagatccagcgtgcgtggtccccagcgttcagctttgcggacgcgaccttgctgcaattcaatacgctgtgtgtgattgagtagctcttcaggtgcaagagaggtttccagcgccacggctgcgtttaagtaatcgggttgatcttgcggccccagcggtggggtgcggtaaaacgaagaaacggtaagaatgtggctttcagggatatcgcctaatgctttcagggcagcattgacctgctccagcggagaggccagattgctgcctatggcaatatacgccactgtcatgcggtaccctcacgacgtggtgcgcgtttgcgtggacgacgagtacgacgacgcggtgacggttcttcatccagctcgttgagcatccctttttggtctggtggcgcggaaacctggaactcaccccaccatttcaccagacgctgcagttcagcgttacgctcaacttcagctcgcaaggccaacaggtcataagccgcacggaacttaggatgctccagcagtttccatgcgcgtttaccctgacgacgggacatacgcaactgcaactgccagatatcgcgggttaatgtcgtcagacgtttcgggattgccagtgaacggcaggcttcgtccagcacgtcgttcatcgccagcgcgaaagcgtcgtgataggtcaggccgctttcctgggcgatcttctgtgccgtctccagcagtgggtaccagaacatggcggcaaacaggaacgccgggttcacgcgcatatcgttatggatacgcgtatcggtattcttcagcacctgttcaatgatccgctccatcgggctgtcgccattttccgtgaagtagcgggtaatggtcgggaacagcggctggaacagatgatattcacacaacagcttataggtttcgtaaccgtagcccgcttgtagcagtttaagcgattcttcaaacaggcgtgccggtgggatatcgttcagcagggtagcgaggcgagggatcggttctgcggtttccgggctgatgcgcatacccaatttggcggcaaaacgtaccgcgcgcagcatacgtaccggatcttcacggtagcgcgtttccgggttaccaatcagacggataacgccgtccttcagatccttcatgccgccaacgtaatcacggacggtaaaatccgctacgctgtaatacaggctgttgatagtgaaatcgcggcgctgggcgtcttcttcgatggagccgaaaatgttgtcgcgcagcaacatgccgttttgcccgcgttgggaggtcgtgcggtcgctgacgttaccttcgtggtgtccacggaaggtcgcaacttcgataatctccgggccaaacattacatgagccagacggaaacggcgacccaccaggcggcagttacggaacagtttgcgcacctgctcaggcgtggcgttagtggttacgtcaaaatctttcggctttttgccaagtaacaggtcgcgcacgccgccgccaaccagccaggcttcgtatcccgctttattgagcctgtacattaccttcagggcattttcactgatatctttgcgggaaatagcatgctgctcacgcgggatcaccgtcacctgtggacgggcgactgcctgttcagcctcgctttcctcgcggcttagcaccttgcggcaaaaattagcgactcgggtaaaaatagtacacctcggtagtgtcaaacatcattcaggacaaaaaaatagcggctaatcatagctcagcatgacgcatttgagaatgttgaatttacaattgccgactcgggcacggcggtaagccgccagtttttgacggctgactgaaggatttgctcgacgctgaaatcctgccagtgtgcttctgcctgctgccccagaaattgaagtgccgcgattagtaccgggcgtggatcgcctttcggcaacgcaggcgcatgattctgcttggaaagtttagcgccttgtggattaagcgccagcggcagatgaatgtaatctggcactttccagccaaaaagctggtacagcgagatttgccttactgttggttcaatcagatcagccccacgcactatttctgtaacgccctggaaatgatcatcaaccacaacagccaggttgtaggcgaacaacccatcacggcgatgaatgataaaatcttcccgtgccagtttttcgtcggcgtgaataatgccgcgcagctggtcagtaaattgcgtgaccggatgctgctggcggatacgcactgcggcgttgtctggtccatgatgcaacacccggcaatgaccgtcgtaaataccgccaatgctttgaatacgcgcacgcgtacaggtgcagtaataacttagtccttgttcatgtaaccaggcgagtgcttcacgataggcgtcgtgacgttgcgattgccagagaacatcgccgtcccagtgcagaccgtaatgttccagctggcgcaggatagtttctgcggcaccgggaacttcacgaggcgggtcgatatcttctatgcgtaccagccagcgaccttgccgggcgcgagcctgcaaatagctgccgagcgcggcgatcagagagccaaaatgaagctcgccggaaggagagggggcgaagcggccaatatactgtgtgtctgtcatctctttgaacaaaaaataaggcgggagcatttcccgcctgtggtaaacgtgatggaacggctgtaattagccagccatctgtttttcgcgaatttcagccagcgttttgcagtcgatgcacagatcggctgtcgggcgcgcttccagacggcgaataccaatttcaacaccgcaggattcgcagtagccgaaatcttcgtcttccacttttttcagcgtcttctcgatctttttgatcagcttacgctcgcgatcgcggttacgcagttcgaggctgaactcttcttcctgggctgcacggtctaccgggtccgggaagttggctgcttcatcctgcatatgtgtaacggtgcgatcgacttcatccctgagttgattacgccatgcttccagaatacgacggaagtgcgccagctgggcttcattcatatactcttcgcccggcttctcctgatatggttccaccccagcgatggcgagaatactcagggacgatgttttacggttttgcccttcttgcatgttgcttctccttaacacgcactatcgatccccatgttcgggggaaaaatgaggccgctataaatagcagatgcttttccggatagcaattatctaaacgtaacacttgacaactgtgtgaggaaaagcgtatttgcgcacgcgaccagaatgtaaattaaccagttacttactttactacaatgtaaccggcagtgattttttaagagccatgccttcagcagaaatttccgctttgtaagccagaatttctacccccctctgttgagcttctgacaatagttgcgcgtatttctcatcgatgtggcgcgcgggtgaaaaccgtgtaatggctgaatgcagcacggcgaaaaagataaccgcacgctggccttcagccgctacgctcatcaactcccgaaggtgtttctgacctcgttcagtgaccgcatcgggaaaatatccctgttcgttctccgctaacgtaaccgatttcacttcaatatagcagtctggacgcgaatccgcctgcaacataaagtcaatacggctgcgttctgcgccgtattttacttcgcttttcagcgagctatagcctgacagttctgaaattgattcattaaggatagcctctttcgtcaacctgttagcccaaagcgtgttgacgcaaataaatgcgccgctctggctttgagttaattcccaggtgtgtgggtatttccgtttggtgttgtctgaagtcgaataccagacggtatcgccaggcgttgcacaaccggtcatcgcacccgtattcgggcagtgtagcgttaattcgcgaccatcgggtgtgatcacatcggctaaaaaacgtttgtaacgctgaattagcgtcgcgcgctgtagagggggagaaaattccattgcgacaatccttgttattgcgttagcgcccagcgttttagcggcgtgtagcgtgtgcgtccacgggcaaacgaggaggcgtaaagggtgaactccgtcaccgcatacgaccagttaaaacctggcggcgggattgtcaccgcctcgctggcgtcgcgcaataaggtaatatgtggatgaaacggacgattgctttgaaaacaaccgctgcgggcagcctgtgaacggagcatattcgccagctggattaagccgcgtggcggctgacgcatccctaaccacaccacacgcgaacgcagccattgtccggcgtcatcaagcgtgagtgtgaaaccaggttgacgaatccgtccggctaaaagagaaagcgccttctctttctcggcgctcacttcgcctaaaaatgccagagtcagatgcaaattatcggcggcgaccggacgtcccgcctcaggtgggaagtgtgtggcgcgccaatggataatctgttcgcggatttctgcaggtaagtcgatagcaaagaacagacgttgcggttcagacatgtgaggcactcggttatgaattaccgcgatgctacaatgtggcgcgaagaatgttaaccctctggagcgttttgtgtcgtcgttgcccgttgctgccgtcttacctgaattacttaccgctctcgattgtgcgccgcaggtattattaagtgcgccgaccggggccgggaaatcaacctggctgccgctgcaactgctggcgcatcccggcattaacgggaaaattatcctgctggagccgcgtcgtctggcggcgcgtaacgtcgcgcaacggctggcggagctgcttaacgaaaagccaggcgataccgttggctaccggatgcgtgcgcaaaactgcgtcgggccgaatacccgcctggaagtggttaccgaaggcgtgctgacgcgcatgatccagcgtgacccggaactgagcggtgttggactggtgatccttgatgaatttcatgagcgcagcttgcaggcggatttggcgttggcgctgttactcgatgtgcaacaaggtctgcgtgatgaccttaaactgctgattatgtcggctaccctggacaacgaccgcttgcagcaaatgctgccagaagcgcctgtcgtcatctcagaagggcgctcgtttccggttgaacgccgttatttaccgctgcccgcgcatcagcgttttgacgatgccgttgcggtagccaccgctgaaatgctgcgtcaggaaagcggatcattactgttatttttacctggcgtcggagaaattcagcgtgtgcaggaacaactggcttcgcgcatcggcagtgatgtattgctctgcccgctgtatggcgcgttgtcgctgaacgatcagcgaaaagcgatcctcccggcaccgcaagggatgcgcaaagtggtgctggcgaccaatattgctgaaaccagtttaaccattgaaggtattcgtctggtggtggattgtgcccaggagcgtgtggcgcgttttgatccgcgcacggggcttacgcgactgattactcaacgcgttagccaggcatccatgacgcagcgtgccgggcgcgccgggcgtctggagccgggtatcagcctgcatttaatcgccaaagaacaagcagaacgcgccgcggcgcaaagtgaaccggagatcttacaaagcgatctttccggtttgctgatggaattactgcaatggggatgcagcgatccggcgcagatgagctggctggatcaaccgccagtagtgaatctactggccgcgaaacgtctgttacaaatgctgggggcactggagggtgaacggcttagtgcgcaagggcaaaaaatggcagcgctgggtaacgatccgcgtttagcggcaatgctggttagcgcgaagaacgacgacgaagctgctaccgcggcaaaaattgccgccattctcgaagagccgccacggatgggcaatagtgacctgggcgtggcgttttcgcgcaatcaaccagcctggcagcaacgtagtcagcaactgttaaaacgcttaaacgtacgtggcggtgaggcagacagttcgcttatcgcgccgctacttgccggggcgtttgccgatcgcattgctcgtcgccgtgggcaagatggacgctatcaactggcaaacggcatgggagcgatgctcgatgccaacgacgcgctaagccgccacgaatggttgatcgcaccgttattattgcagggcagcgcctcgccggatgcgcggattttactggcgctgctggtcgatattgatgagttagtacaacgctgcccgcagctggtacagcagtctgacactgtggagtgggatgacgcgcaaggtacgctgaaagcctggcgtcggctacaaatcggtcagttgacggtgaaagtgcagccgctggcgaaaccgtcagaagacgagttgcatcaggcgatgcttaatggcatccgtgataaaggtttaagcgtgctcaactggacggcggaagcggaacagctacgcttgcgtttgttatgcgccgcaaagtggttgccggaatatgactggccagcggttgatgatgaaagtttattggcagcgctggaaacgtggctgctgccacatatgactggcgtacattcactacgcggcctgaaatcactcgacatttatcaggcactacgcggattacttgattggggaatgcagcaacgtctggatagtgaattgcctgcgcattacactgtgccgacgggaagccggatcgccattcgttatcatgaagataacccgcccgcgctggcggtgagaatgcaagagatgtttggcgaggccaccaatccgacgatcgcccaggggcgcgtgccgctggtgctggagttgctttcacctgcccaaaggccattacaaatcacacgagatttgagcgacttctggaaaggagcgtaccgtgaggtgcaaaaagagatgaaagggcgttatcccaaacatgtctggccggacgacccggcaaatactgcaccgacgcgacggacgaaaaagtattcgtaaggttggttttctccctctccctgtgggagagggccggggtgagggcatcagcgcgcacgttcaccctcaccctaaccctctccctcaagggagaggggaccgatcgagcacaaattttgagagatatcttcttctgtcttgtaacagaagaacagaaaatcgggcttttgcgcctgaatattgcggagaaaaagcatggccgggaatgaccgcgagccaattggacgcaaagggaaaccgacgcgtccggtcaaacaaaaggtaagccgtcgtcgttacgaagatgacgatgattacgacgattatgatgactatgaggatgaagaaccgatgccgcgcaaaggtaagggcaaaggcaaagggcgtaagcctcgtggcaaacgcggctggctatggctactgctaaaactggctatcgtttttgccgtgctgatcgccatttacggcgtttatctcgatcaaaaaattcgtagccgtattgatggcaaggtctggcaactgcctgcggcagtttatggccgaatggtcaatcttgagccagacatgaccatcagcaagaacgagatggtgaagctgctggaggcgacccagtatcgtcaggtgtcgaaaatgacccgtcctggcgaatttaccgtgcaggccaacagcattgagatgattcgccgtccgtttgatttcccggacagtaaagaaggacaggtgcgcgcgcgtctgacctttgatggcgatcatctggcgacgatcgtcaatatggagaacaaccgtcagttcggtttcttccgtcttgatccgcgtctgatcaccatgatctcttcgccaaacggtgagcagcgtctgtttgtgccgcgcagtggtttcccggatttgctggtggatactttgctggcgacagaagaccgtcatttttacgagcatgatggaatcagtctctactcaatcggacgtgcggtgctggcaaacctgaccgccggacgcacggtacagggtgcgagtacgctgacgcaacagctggtgaaaaacctgttcctctccagcgagcgttcttactggcgtaaagcgaacgaagcttacatggcgctgatcatggacgcgcgttacagcaaagaccgtattcttgagctgtatatgaacgaggtgtatctcggtcagagcggcgacaacgaaatccgcggcttcccgctggcaagcttgtattactttggtcgcccggtagaagagctaagcctcgaccagcaggcgctgttagtcggtatggtgaaaggggcgtccatctacaacccgtggcgtaacccaaaactggcgctggagcgacgtaatctggtgctgcgtctgctgcaacagcaacagattattgatcaagaactctatgacatgttgagtgcccgtccgctgggggttcagccgcgcggtggggtgatctctcctcagccagcctttatgcaactggtgcgtcaggagctgcaggcaaaactgggcgataaggtaaaagatctctccggcgtgaagatcttcactacctttgactcggtggcccaggacgcggcagaaaaagccgccgtggaaggcattccggcactgaagaaacagcgtaagttgagcgatcttgaaactgcgattgtggtcgtcgaccgctttagtggtgaagttcgtgcgatggtcggaggttctgagccgcagtttgcgggctacaaccgtgcgatgcaggcgcgtcgttcgattggttcccttgcaaaaccagcgacttatctgacggccttaagccagccgaaaatctatcgtctgaatacgtggattgcggatgcgccaattgcgctgcgtcagccgaatggccaggtctggtcaccgcagaatgatgaccgtcgttatagcgaaagcggcagagtgatgctggtggatgcgttgacccgttcgatgaacgtgccgacggtaaatctggggatggcgctggggctgcctgcggttacggagacctggattaaactgggcgtaccgaaagatcagttgcatccggttccggcaatgctgctgggggcgttgaacttaacgccaatcgaagtggcgcaggcattccagaccatcgccagcggtggtaaccgtgcaccgctttctgcgctgcgttcggtaatcgcggaagatggcaaagtgctgtatcagagcttcccgcaggcggaacgcgctgttccggcgcaggcggcgtatctgacactatggaccatgcagcaggtggtacaacgcggtacgggtcgtcagcttggggcgaaatacccgaacctgcatctggcagggaaaacagggactaccaacaataacgtagatacctggtttgcgggcattgacggcagcacggtgaccatcacctgggtcggccgtgataacaaccagccgaccaaactgtatggtgccagcggggcaatgtcgatttatcagcgttatctggctaaccagacgccaacgccgctgaatcttgttccgccagaagatattgcagatatgggcgtggactacgacggcaactttgtttgcagcggtggcatgcgtatcttgccggtctggaccagcgatccgcaatcgctgtgccagcagagcgagatgcagcagcagccgtcaggcaatccgtttgatcagtcttctcagccgcagcaacagccgcaacagcaacctgctcagcaagagcagaaagacagcgacggtgtagccggttggatcaaggatatgtttggtagtaattaacatctaagcgtgaaataccggatggcgagttgccatccggtaaaataacatcccatctaagatattaaccctttcttttcatctggttgtttattaacccttcaggaacgctcagattgcgtaccgcttgcgaacccgccagcgtttcgaatattatcttatctttataataatcattctcgtttacgttatcattcactttacatcagagatataccaatggcgcgttccaaaactgctcagccaaaacactcactgcgtaaaatcgcagttgtagtagccacagcggttagcggcatgtctgtttatgcacaggcagcggttgaaccgaaagaagacactatcaccgttaccgctgcacctgcgccgcaagaaagcgcatgggggcctgctgcaactattgcggcgcgacagtctgctaccggcactaaaaccgatacgccgattcaaaaagtgccacagtctatttctgttgtgaccgccgaagagatggcgctgcatcagccgaagtcggtaaaagaagcgcttagctacacgccgggtgtctctgttggtacgcgtggcgcatccaacacctatgaccacctgatcattcgcggctttgcggcagaaggccaaagccagaataactatctgaatggcctgaagttgcagggcaacttctataacgatgcggtcattgacccgtatatgctggaacgcgctgaaattatgcgtggcccggtttccgtgctttacggtaaaagcagtcctggcggcctgttgaatatggtcagcaagcgtccgaccaccgaaccgctgaaagaagttcagtttaaagccggtactgacagcctgttccagactggttttgactttagcgattcgttggatgatgacggtgtttactcttatcgcctgaccggtcttgcgcgttctgccaatgcccagcagaaagggtcagaagagcagcgttatgctattgcaccggcgttcacctrgcgtccggatgataaaaccaattttaccttcctttcttacttccagaacgagccggaaaccggttattacggctggttgccgaaagagggaaccgttgagccgctgccgaacggtaagcgtctgccgacagactttaatgaaggggcgaagaacaacacctattctcgtaatgagaagatggtcggctacagcttcgatcacgaatttaacgacacctttactgtgcgtcagaacctgcgctttgctgaaaacaaaacctcgcaaaacagcgtttatggttacggcgtctgctccgatccggcgaatgcttacagcaaacagtgtgcggcattagcgccagcggataaaggccattatctggcacgtaaatacgtcgttgatgatgagaagctgcaaaacttctccgttgatacccagttgcagagcaagtttgccactggcgatatcgaccacaccctgctgaccggtgtcgactttatgcgtatgcgtaatgacatcaacgcctggtttggttacgacgactctgtgccactgctcaatctgtacaatccggtgaataccgatttcgacttcaatgccaaagatccggcaaactccggcccttaccgcattctgaataaacagaaacaaacgggcgtttatgttcaggatcaggcgcagtgggataaagtgctggtcaccctaggcggtcgttatgactgggcagatcaagaatctcttaaccgcgttgccgggacgaccgataaacgtgatgacaaacagtttacctggcgtggtggtgttaactacctgtttgataatggtgtaacaccttacttcagctatagcgaatcgtttgaaccttcttcgcaagttgggaaggatggtaatattttcgcaccgtctaaaggtaagcagtatgaagtcggcgtgaaatatgtaccggaagatcgtccgattgtagttactggtgccgtgtataatctcactaaaaccaacaacctgatggcggaccctgagggttccttcttctcggttgaaggtggcgagatccgcgcacgtggcgtagaaatcgaagcgaaagcggcgctgtcggcgagtgttaacgtagtcggttcttatacttacaccgatgcggaatacaccaccgatactacctataaaggcaatacgcctgcacaggtgccaaaacacatggcttcgttgtgggctgactacaccttctttgacggtccgctttcaggtctgacgctgggcaccggtggtcgttatactggctccagttatggtgatccggctaactcctttaaagtgggaagttatacggtcgtggatgcgttagtacgttatgatctggcgcgagtcggcatggctggctccaacgtggcgctgcatgttaacaacctgttcgatcgtgaatacgtcgccagctgctttaacacttatggctgcttctggggcgcagaacgtcaggtcgttgcaaccgcaaccttccgtttctaatttctcttttggggcacggatttccgtgcccatttcacaagttggctgttatgcaggaatacacgaatcattccgataccacttttgcactgcgtaatatctcctttcgtgtgcccgggcgcacgcttttgcatccgctgtcgttaacctttcctgccgggaaagtgaccggtctgattggtcacaacggttctggtaaatccactctgctcaaaatgcttggccgtcatcagccgccgtcggaaggggagattcttcttgatgcccaaccgctggaaagctggagcagcaaagcgtttgcccgcaaagtggcttatttgccgcagcagcttcctccggcagaagggatgaccgtgcgtgaactggtggcgattggtcgttacccgtggcatggcgcgctggggcgctttggggcggcagatcgcgaaaaagtcgaggaagctatctcgctggttggcttaaaaccgctggcgcatcggctggtcgatagtctctctggcggcgaacgtcagcgggcgtggatcgccatgctggtggcgcaggatagccgttgtctgttgctcgacgaaccgacctcggcgctggatatcgcccaccaggttgatgtgctgtcgctggtgcaccgtttaagtcaggagcgtggcctgacggtcattgccgtgttgcacgatatcaatatggcggcacgctactgtgattatctggtcgccctgcgcggcggtgaaatgattgctcagggaacgcctgcggaaattatgcgcggcgaaaccctcgaaatgatttatggcatcccgatgggtattttgccgcatccggcgggtgctgcacctgtgagttttgtttattgatgagcggcttacctcttatttcgcgccgtcgactgttaacggcgatggcgctttctccgttgttatggcagatgaataccgcccacgcggcggctattgatcccaatcgtattgtggcgctggagtggttgccggtggaattactgctggcgctcggcatcgtgccttacggcgtggcggataccatcaactatcgcctgtgggtcagcgaaccaccattgccggactcagtgatcgacgtcggtttgcgcacagaacctaaccttgaactgctgaccgaaatgaaaccatcgtttatggtctggtcggcaggatatggcccttcaccagaaatgctggctcgtattgcgccgggtcgcggatttaacttcagtgacggcaaacagccgttggcgatggcgcgtaaatcgctgacggaaatggcagatttacttaacctgcaaagcgcagcggaaacgcatttagcgcaatatgaagactttatccgcagcatgaaaccccgctttgtgaagcgtggtgcgcgtccgttattgctgacgacgcttatcgatccgcgccatatgctggtcttcggtccaaacagcttgttccaggaaattcttgatgagtacggcatcccaaatgcctggcaaggggaaaccaacttctggggcagtaccgccgtcagtatcgatcgtctggcggcgtataaagacgttgatgtgctctgttttgatcacgacaacagcaaagacatggatgcgctaatggcaacgccgctgtggcaggccatgccgtttgtccgcgccggacgctttcagcgcgtacctgcagtctggttttatggtgcgacgctctcggcaatgcactttgtgcgcgttctggataacgccatcggaggtaaagcgtgagtaaacgaattgcgcttttcccggcgttattgctggcgctgttagtgattgtcgctacggcgctcacctggatgaacttctcgcaggcgctgccgcgtagccagtgggcgcaggctgcctggtcgccggatattgacgtcatcgagcagatgatttttcactacagcttgttgccgcgtctggcgatttcgctgctggtgggcgcgggtctggggctggtgggcgtgctgtttcagcaagtgctgcgtaacccgctggcggagccgacgacgcttggcgttgctacaggcgcgcaactggggattaccgtcactacgctctgggcgatccctggtgcgatggcgagccagtttgctgcgcaggcaggggcttgtgttgttggcttaattgtctttggcgtcgcgtgggggaaacggctgtcgccggtaacgctgattctcgcggggttggtagtgagcctttattgcggcgcaatcaatcagttactggttatcttccatcatgaccaactgcaaagcatgtttctgtggagcactggaacgctgacgcaaaccgactggggcggcgttgagcgtttatggccgcagctgctgggcggtgtgatgctgacgttgctgctacttcgtccgttaaccctgatggggcttgatgatggcgtggcgcgcaatctcgggctggccttgtcgcttgcgcgtctggcagcgctgtcgctggcgattgtcatcagtgcgctgctggtgaacgctgtggggattatcggctttatcgggttgttcgcgccgctgctggcaaaaatgctgggggcgcggcgtctgctgccacgactgatgctggcgtcgttgattggtgcgctgatcctctggctttccgatcaaatcatcctctggctgactcgcgtgtggatggaagtgtccaccggttcggtcactgcgttgatcggtgcgccgctgctactgtggctgttgccgcgtttacgcagcattagcgcgccggatatgaaggtcaacgatcgtgtcgcggctgaacgccaacatgtgctggcgtttgccctcgcgggcggcgtgctgctgttgatggctgtggtggtggcgctgtcgtttggtcgtgatgcgcacggctggacgtgggcgagcggggcgttgctcgaggatttaatgccctggcgctggccgcgaattatggcggcgctgtttgcgggcgtcatgctggcggtggcgggctgtattattcagcgactgaccggaaacccgatggcaagcccggaagtgctggggattagctccggcgcggcgtttggcgtggtgttgatgctgtttctggtgccgggtaatgcctttggctggctgttacctgcaggcagtctcggcgcggcggtgacgctgttgatcattatgatcgccgccggccgcggtggattttccccacaccgtatgttactggcggggatggcgttaagcaccgcgttcaccatgcttttgatgatgttgcaggcaagtggtgacccgcgaatggcgcaagtgctgacctggatttccggttcgacctacaacgcgaccgatgcgcaggtctggcgcaccggaattgtgatggtgattttgctggcgattaccccgctgtgccgccgctggctgaccattttaccgctgggtggtgataccgcccgagccgtaggaatggcgctgacgccgacgcgaattgcgctgctgctgttagcggcttgcctgacggcgaccgcgacgatgactattggaccgttgagttttgttggtttaatggcaccgcatattgcgcggatgatgggctttcgacggacgatgccacacatcgtaatttcggcgctggtgggtggtttactgctggtgttcgctgactggtgtgggcggatggtgctgtttccattccagatcccggcggggctgctgtcaacctttatcggcgcgccatattttatctatttgttgagaaagcagagccgttaatttttccatataacggccctgtacgcctggacggataaagcgtttacgcgacaacggatgcccgatgcgacgctggcgcgtcttatcgggcctacaaacggccccgaatcgtaggtcggataaggcgttcacgccgcatccgacaaaccatgctggatcacaacttcgcaaacacccgacgtgcagcatcgatggtgttattgatatcttccatgctgtgcgccacggacataaagcccgcttcaaacgctgacggtgccaggtaaacaccttcgtccagcatcatatggaagaaacgcttaaagcgttccacgtcacaggccatcacatcctgatagcacgtcacggactcggcgtcggtaaagaaaataccgaacatgccgccaacgtggttaacgaccagcggaattccggcttcttctgccgcttccagcagaccttctgccagacgtgttgtcagctcatccagcgtttcgtgaacgcccggctgcgcgacttcattcagacaggcgaaacccgctgccatcgcaatcgggttaccggaaagcgtacccgcctgatagaccggacccgtcggggccagcgcatccattacatcacgacgaccaccgaatgcgcctaccggcattccaccgccgatgattttgccgaggcaggttaaatctggcactacgccgtaataatcctgtgcgccagctagcgctacgcggaaaccggtcatcacttcatcgatgatcagcaacgcgccaaattcgtcgcacagcgcgcgcagacctggcaggaactctggcagcggcggaacacagttcatattgcctgccaccggctcgacgataatacaggcaatctcttgcgggtattgctcaaatgcggcgcgtacagaagccagatcattataagtacaggttaaggtatatttggcgaaatctgccggaacgcccggcgagtttggctggcctaacgtgagtgcgccagaaccggctttcaccagcaggcagtcagcgtgaccatggtaacacccttcaaatttaataattttgtcgcgaccggtaaaaccacgggccaggcggatggcgctcatggtcgcttcagtgccggagttcaccatgcgcaccatatccatggtcgggaccagttcggtcaccagttgcgccattttcacttccatttcggttggtgcaccaaagcttaaaccacgctcggcggcttcaatcacggcattgcggattgccggatggttatggcccagcaccatcggcccccaggaaccgacataatcgatataggctttgccatcaacatcgtacagataagcgccgtccgctttttcgataaacagtggagtgccgcccacgccagtaaaggcgcgaacaggggagttcacaccgccagggatcagctcgcgcgctgcgctgtaaagattttcagacttactcatggagggttcctgattcgtagaaaaagtgaatggctgctattctatgttattcataacaagttaaatactcgtcaaacatcaggctgcttgtactggtgcaatcctgatttcttagagtataaaagttttgtgcatttgaaacattacgctttgcaaaggattttcatggaacgtgcgagtaaaatgccgtcatcttatttgtatgaccaataagtgatcattggatgaaaactgatactccctctttagaaacaccgcaggccgcgcgcctgcgacgcagacaactgattcgccaacttcttgagcgcgataaaaccccgttagccattttgtttatggcggcagtcgtcggcacgcttgttgggctggcagcggttgcttttgacaaaggtgtcgcctggttgcagaaccaacgtatgggggcgctggtacatactgctgataattatccgcttctgttaaccgtcgcttttctctgttcggcggtgctggcgatgtttggctactttttggtgcgcaaatacgcgccggaagcaggtggttcggggatcccggaaattgaaggggcgctggaagatcaacgtcccgttcgctggtggcgtgtattgccggtgaagttctttggcgggctggggacactcggcggaggcatggtgttggggcgcgaagggccaaccgtgcagatcggcggtaacattggccgtatggtgcttgatattttccgcctgaaaggtgacgaagctcgccatacgctgctggcaaccggtgctgctgcggggctggctgcggcctttaacgcgccgctggcgggtattttgtttattatcgaagagatgcgtccgcagtttcgctatacgttaatttcgattaaagcggtatttattggtgtcattatgtcgaccattatgtaccggatttttaatcatgaagttgcgttgattgacgtcggtaaactttctgatgcgccgcttaatacgctgtggctttatctgatcctcggtattatttttggcattttcggccctatttttaataaatgggtgctggggatgcaggatttgctgcaccgtgtgcacggcggcaatattaccaaatgggtgctaatgggcggtgcgattggcggtctgtgtggattgctggggtttgtggcaccagcaacgtcgggcggcggttttaacctgattcctatcgctaccgcggggaatttcagcatgggaatgctggtgtttatcttcgtcgcgcgggtcattaccaccttactctgcttctcttccggcgcgccgggcggtatttttgccccgatgctggcgctgggtactgtgctgggaaccgctttcggaatggttgccgttgagctgtttccgcaatatcaccttgaggcggggacgtttgctattgccggaatgggggcattactggcggcatctattcgcgcgccgttaacggggatcattctggttctggagatgaccgataactaccagctcattttgccaatgattattaccggtcttggcgcaacactattagcgcaatttaccggcgggaaaccgctatactcggcgattcttgcgcgcacgctggcaaaacaggaagctgagcaactggcgcgaagcaaggccgcatcagccagcgagaatacttgaacgaaataccagggtattagataatggcgattattattgggttagaatttgcccaattgccgatgtcgtttggagcaaaatatgagtgatgacgtagcactgccgctggagtttaccgacgcagcagccaacaaagttaaaagcctgatcgctgacgaagataacccgaatctgaaattacgcgtgtatatcaccggtggcggttgcagcggcttccagtatggtttcacctttgatgatcaggtgaacgaaggcgatatgaccatcgaaaaacagggcgttggcctggtggttgatccgatgagcctgcaatatctggtcggcggttccgttgattataccgaaggtctggaaggttctcgtttcatcgtgaccaacccgaacgcgaaaagcacctgcggttgcggttcttcctttagtatctaatctgttgttcatgtgccggataaactatccggcacatcttctctcttcaacgcccattctcatccagcgcaaacgtcggtagcttaagatgccaacgaatagccgccagccgaatcaatagcgtcacgaccatgcccatcatactggctgtttccagtggtacggaaaatgtgtaataagccgtagcgtggacaataccgccgataatacaggcagttgcgtagatttctgtacgtaaaatcatggggatttcgcgggccagaacatcacgaatgatcccgccgccaacgccagtaatgacgcccatacaaaccgcgattaacggaccggcttccgcattaaaggctttattcacgccaatgccgacaaacaccgccagaccaacggcgtccagcaccggcaacatccattttggtaagcgtcttggctggcgcaccagcacgatggtcagcatgctggtgaccattgcaacgaccagatcggtgggatctttcacccaaaataccgggccgtgatccagcgccatgtcgcgaattgtcccgccgcctactgcggttaccacgcccagtaccagaacaccaaaagggtccatacgcaattttccggctaacaaaacgccggagatggcaaataccgctgtgccgactatatccagccaatagacgagcattgttcaatccccactgagcacctgaaaaggtcaggcgctaatctacctgtgaaagcgcattacagagctgttgtgcagcgaggataatacgtgggcttgcacgttcaaaccagtcactcgtgagaggaataacgggaattttgagctgttcaccccagtattgtttgattttaggaatttggtccggtccgcctgtaatgacaatcgcctgtggcgagcgtgctaacacctgttcgcggctaacttgcggccagggaacccggctgtctttaaagatgttttctccgccacaaacttcgagtacctggttctgaatcgactcttttccactggtaaatggcggattaatgccgaattgcagaaaaacacgttttttaggtttatcagcatattgcgctttcaattgcgcgtactgatccagcagggattgcgcggcttgttcggccttgtctggttgcggactccagggggccagttgacgtaacgcattggcaatttgttcaatgcttgtcgcatcgacccacatcacttttattcccagcgaagccagctggtcaacctgccgctcggcattacctccacgccaggcaatcaccagatcgggtttcagcgcgacaatgcgttccagattcatcccctgccaggtggaaacctgctcaatcttttgcgcttgtggaggatagtcggaatagctgctgaccccaaccggcgtgatcccggcggcaaaggcaagttcagtgttggcgggagaaagcgtgatgacgcgcggcgcggcgttgagccacagtggcgcaagaaaagacagggcgaccagcgccctgaacagtgacttagccatgtgcaagtttctgcaccagtgactcaaccatcaggctggactgtttagcggcaacagccaggaactcatcgaagctaagatgagactgttgatcggccacgtcggagatggcgcgtacgacaacaaacgggacgttgaaattgtggcagacatgggcgattgccgtcgcttccatctctacagcaatggcctgtgggaagttgtggcggattttcgccagaccaacagaaccgttgatgaaagcgtcgccgctaacaatcaggccacgtacagcgttaagattcagttcggcaatgcaggcctcagcggcagcgatcagtttatcgtcagctttaaagcctgccggacagcctggtaactgaccgtattcataaccaaatgccgtgacatccgcgtcgtgataacgtgcttcgtccgagacaacgatatcgcccactttcaacgttggtgccaggccaccggcagaaccggtgttaataatcacatctggcttgcagtgttccaacagcaaagtggcacccagcgccgcagcgactttaccgatgcccgatttcagaagcgcaacctcggttccattcagttggccggtatagatttcgcaaccgccgagactgatagtttgacggttttcgattttgtcacgcagcagcgtaacttcttcttccattgcaccaatgatgccgattttcatagatttactcgcgataagcccgatttgaaggcatagtttaccatgcgcttacggggaagcgtatttctcacgcgggagaggacatggcacagattgatttccgaaaaaaaataaactggcatcgtcgttaccgttcaccgcagggcgttaaaaccgaacatgagatcctgcggatcttcgagagcgatcgcgggcgtatcatcaactctccggcaattcgtcgtctgcaacaaaagacccaggtttttccactggagcgcaatgccgccgtgcgcacgcgtcttacccactcgatggaagtccagcaggtggggcgctacatcgccaaagaaattttaagccgtctgaaagagcttaaattactggaagcatacggcctggatgaactgaccggtccctttgaaagcattgttgagatgtcatgcctgatgcacgatatcggcaatccgccgtttggtcattttggcgaagcggcgataaatgactggtttcgccaacgtttgcacccggaagatgccgaaagccagcctctgactgacgatcgctgcagcgtggcggcactacgtttacgggacggggaagaaccgcttaacgagctgcggcgcaagattcgtcaggacttatgtcattttgaggggaatgcacaaggcattcgcctggtgcatacattgatgcggatgaatctcacctgggcacaggttggcggtattttaaaatatacccgtccggcgtggtggcgtggcgaaacgcctgagacacatcactatttaatgaaaaagccgggttattatctttctgaagaagcctatattgcccggttgcgtaaagaacttaatttggcgctttacagtcgttttccattaacgtggattatggaagctgccgacgacatctcctattgtgtggcagaccttgaagatgcggtagagaaaagaatatttaccgttgagcagctttatcatcatttgcacgaagcgtggggccagcatgagaaaggttcgctcttttcgctggtggttgaaaatgcctgggaaaaatcacgctcaaatagtttaagccgcagtacggaagatcagttttttatgtatttacgggtaaacaccctaaataaactggtaccctacgcggcacaacgatttattgataatctgcctgcgattttcgccggaacgtttaatcatgcattattggaagatgccagcgaatgcagcgatcttcttaagctatataaaaatgtcgctgtaaaacatgtgtttagccatccagatgtcgagcggcttgaattgcagggctatcgggtcattagcggattattagagatttatcgtcctttattaagcctgtcgttatcagactttactgaactggtagaaaaagaacgggtgaaacgtttccctattgaatcgcgcttattccacaaactctcgacgcgccatcggctggcctatgtcgaggctgtcagtaaattaccgtcagattctcctgagtttccgctatgggaatattattaccgttgccgcctgctgcaggattatatcagcggtatgaccgacctctatgcgtgggatgaataccgacgtctgatggccgtagaacaataaccaggcttttgtaaagacgaacaataaatttttaccttttgcagaaactttagttcggaacttcaggctataaaacgaatctgaagaacacagcaattttgcgttatctgttaatcgagactgaaatacatgaaaaaaaccacattagcactgagtgcactggctctgagtttaggtttggcgttatctccgctctctgcaacggcggctgagacttcttcagcaacgacagcccagcagatgccaagccttgcaccgatgctcgaaaaggtgatgccttcagtggtcagcattaacgtagaaggtagcacaaccgttaatacgccgcgtatgccgcgtaatttccagcagttcttcggtgatgattctccgttctgccaggaaggttctccgttccagagctctccgttctgccagggtggccagggcggtaatggtggcggccagcaacagaaattcatggcgctgggttccggcgtcatcattgatgccgataaaggctatgtcgtcaccaacaaccacgttgttgataacgcgacggtcattaaagttcaactgagcgatggccgtaagttcgacgcgaagatggttggcaaagatccgcgctctgatatcgcgctgatccaaatccagaacccgaaaaacctgaccgcaattaagatggcggattctgatgcactgcgcgtgggtgattacaccgtagcgattggtaacccgtttggtctgggcgagacggtaacttccgggattgtctctgcgctggggcgtagcggcctgaatgccgaaaactacgaaaacttcatccagaccgatgcagcgatcaaccgtggtaactccggtggtgcgctggttaacctgaacggcgaactgatcggtatcaacaccgcgatcctcgcaccggacggcggcaacatcggtatcggttttgctatcccgagtaacatggtgaaaaacctgacctcgcagatggtggaatacggccaggtgaaacgcggtgagctgggtattatggggactgagctgaactccgaactggcgaaagcgatgaaagttgacgcccagcgcggtgctttcgtaagccaggttctgcctaattcctccgctgcaaaagcgggcattaaagcgggtgatgtgatcacctcactgaacggtaagccgatcagcagctttgccgcactgcgtgctcaggtgggtactatgccggtaggcagcaaactgaccctgggcttactgcgcgacggtaagcaggttaacgtgaacctggaactgcagcagagcagccagaatcaggttgattccagctccatcttcaacggcattgaaggcgctgagatgagcaacaaaggcaaagatcagggcgtggtagtgaacaacgtgaaaacgggcactccggctgcgcagatcggcctgaagaaaggtgatgtgattattggcgcgaaccagcaggcagtgaaaaacatcgctgaactgcgtaaagttctcgacagcaaaccgtctgtgctggcactcaacattcagcgcggcgacagcaccatctacctgttaatgcagtaatctccctcaaccccttcctgaaaacgggaaggggttctccttacaatctgtgaacttcaccacaactccatacatcttcatcatcctttaggcatttgcacaatgccgtacgttacgtacttccttatgctaagccgtgcataacggaggacttatggctggctggcatcttgataccaaaatggcgcaggatatcgtggcacgtaccatgcgcatcatcgataccaatatcaacgtaatggatgcccgtgggcgaattatcggcagcggcgatcgtgagcgtattggtgaattgcacgaaggtgcattgctggtactttcacagggacgagtcgtcgatatcgatgacgcggtagcacgtcatctgcacggtgtgcggcaggggattaatctaccgttacggctggaaggtgaaattgtcggcgtaattggcctgacaggtgaaccagagaatctgcgtaaatatggcgaactggtctgcatgacggctgaaatgatgctggaacagtcgcggttgatgcacttgttggcgcaggatagccgtttgcgggaagaactggtgatgaacctgattcaggcagaggagaatactcccgcacttactgaatgggcgcaacggctggggatcgatctcaatcaaccgcgagtggtggctattgttgaggtcgacagcggtcagcttggcgtggacagcgcaatggcggagttacaacaactgcaaaacgcgctgactacgcccgagcgtaataatctggtggcgattgtctcgctaaccgaaatggtggtgttgaaaccggcgttgaactcttttgggcgctgggatgcagaagatcatcgtaagcgagttgaacaactgattacccgcatgaaagagtacggccagctgcgttttcgcgtttcactgggcaactattttaccggtcctggcagtattgcccgatcctatcgtacggcgaaaacgacgatggtggtgggtaaacagcggatgccagaaagtcgctgctatttttatcaggatctgatgttacctgtgttactcgacagtttgcgtggcgactggcaggccaacgaactggcgcgaccgctggcgcggctgaaaacgatggacaataacggcttgctgcgacgaacgctggcggcgtggtttcgccacaatgtgcaaccgctggcaacgtcaaaggcgttgtttattcatcgtaataccctggagtatcggcttaatcgtatatcggaactgaccgggcttgatttgggcaattttgatgacaggttgctgctgtatgtggcgttacaactggatgaagagcggtaggttatgcgttaaggttgaggcggcgctggctcattcccctcagcccgaagggtagaggggaatgcccgaattaaccgtcagttcgggattatttacgcgttagtttttccagatcggcttcaatctcgctgatcttattggttacgactgactccaggtgacgtaagtcgtcgaggatcttacgcttaagatcaacttcgctgcggtcacgctggcagatttgatcaagctcatcaatgatataccgtagattcgggctgatttcctggacttctttataaccctgacccacaccatcagcgacgaccgttttacgctgacgcggatatttaaacttaacgctcttggcgaaaaactcgcctttgtctttctggaaatagattttcagaatatcgttgttggcttcctgccggaggctgtaacgatcaatttcttcaggattggtaatacccagacttttcagattgtcgtacatagcgttacctcaaaatgagtcagtaaattgtgcttattttagcatttggcctggcccgcccggctcgactgtgatcgcagaaagcctttttcttccagacttctatcatggcgtaaaaatcaaaaaattacctgctttattctggtgataaaattcacgatctacaccagttccagcatcgttacttccgggcggcagttcagacgcaaaccatacaaactgcccacgccacgggttgtgtagatgtgtctttcgccaaaggcatttaatccggcgacgtaacgtttatcttcgacaggggcaaaaggttcaccaaccaacggtacgcgcagttgcccgccgtgagtatggccgcacagcatcagatcccagggttcatcacgcatgacttctttgctgtcgggattatgcgccagcaccagtcttggcagattggcttcgctggcgggaggcggtttgcattgtccggcccataagtcaccagtgcctaccagttcgaattgcctgttcggcgtggcgatcaccgtagcctggttaaacaacaccgtgatgcccgctgatttcaacgtctcgccaattaagtgatttttttctgtaccaacagggcgatcgtggttgccgaagcaggcaaacgtcggcgcacattcggcaaggggggagagtacgtcactaaacgccgaaaaattcagcgacatatcaaataatacgtaatcgccgcccagtaatatcaaatcgggcttttgttctatgccaagagcaatcgcgtcagaaatcaggcttaaaggaacaaaacgagagtaatggagatcggccagaaaaagaattttgaatggtgctgcgttgtctttaaaaaaggcgaggcggtgacggattaattcaaaccagcctggctcacagtaatgcatataaccgaaacctgagctcgtggctatcgtcgcggcagtagcctgcaaaaatcggcggcgtgaaatcatcgctcatccctgcaaaaaaatcgggcagcgtcgtgctgcccgtgtgcatacttttagtcgatggtacgcagcagttcgttaatgccgactttgccgcgagttttcgcgtcaactttcttaacgataaccgcacagtagaggctgtatttgccatcttttgacggcagattacctgaaacaaccacagaccccgccggaacgcgaccgtagtggatttcgccggtttcacggtcgtaaatacgggtgctctgaccaatgtatacgcccatggaaatgacggaaccttcttcgacaatcaccccttcaaccacttcagagcgcgcgccgatgaagcaattatcttcaatgatggttgggttagcctgcagcggttccagcacgccgccgatgcccacgccaccggaaaggtggacgtttttaccaatctgcgcacaagaaccgacggtcgcccaggtatcaaccatggtgccttcatcaacatatgcgccgatgttgacgtaagacggcatcagcacggtgttacgggcaataaacgcaccctgacgtaccgccgctggtggcacaacgcggaagccttctttctggaaacgtgcttcgtcgtagtcggcgaatttcatcggcactttgtcgaagtagcggctttctgccccttcgatcacctgattatcattaatacggaaagagagcagcaccgcttttttcaaccactgatgcgtcacccactgaccgtcaattttttccgctacacgcagtgcgccggaatccagcagggcgatcacctgatttaccgcttcgcgggtaacggtgtctgcattggctggcgtgatctcggcacggcgttcaaaagcggtttcaataatgttctgtaactgctgcattgttaaactcttttcatatcagtaaacacatcaccctttatcgtttggattgagggcctctgtcaaccgctgatgcacttcctgctgcaactcgttattaagcgcacgccggtcagcggtggcaattatgaataaatcttctactcgctcgccaatggttgtaattcgggcaccatgaagcgaaattcccagatcggcaaaaattttcccgactcgcgccagcagtccaggttggtcgagggcgatcagttcgaggaacgatttgcggtcggtatgggtcggcaaaaacgttacttcggtttcaacagtaaaatggcgtaatttggcgggttggcgacggggctgcggtggctgccagctactttgcgtcagtacttgctccagaccaaaccgaataacctcatgacgatctgcggacagcgggttgccatcgggttccagcacgataaaggtatccatcgccataccgtcgcgagtggtgaaaatttgtgcgtcgtgaacacttaaattgcggcggtctaattcggcacagacggcggcaaacagataagggcggtccgggctccagataaaaatctcggtgcctccacgcgtagcctgcgggctaagcaataccagcggtttgcttaaatcatgctgtaataaatggcgggcatgccaggccagttgatttgggctatggcggacaaaatagttagcacgacagcgtgaccaaatttggtgcagcgcctcttcgtcgatgttatccatgcgcagtagtgccagtgcctggagttggtgatggcgaacccgttcgcgcatatccggcgtgttttgcattccgcgtcgtagctgcttttcggtggcaaagtagagctcacgcaacagactttgcttccagctattccacagcgtttcgttggtggcgcaaatgtcagccacagtcaggcataccagatagcgcagacgattttccgtttgcacttcttcggcaaactgcttgatgacttccgggtcctgaatatcgcggcgttgggcggtcaccgacatcaacaggtgctggcgaaccagccaggcgaccagctgtgtttcgcgtgagttcagcccgtggagttcggcaaaatgcactacatcctgagcaccgagaatggagtggtcgccgccgcgtcctttggcgatatcgtgaaacagcgcggcgatgaaaatcagctcagttgacggcaggcgcggccagacgtccacacacaacggatggcgctggcgcgtttcttcactggcaaaactctccagtttcagcatcacgcggatagtatgttcatccaccgtgtaggcgtggaacagatcaaactgcatctgcccgacgatatgcgaccattgcggcatatacgcgccgagcacgctatggcgatgcattggcaatagcccgcgccgcaccgctccggggtgacgcagaatgctcaaaaacagttttcgtgcttccggaatattacacagcggttgttgcagatggcgacgggcatggcgtaactggcgcagcgtggtggagtaaatgccggtgatcgcactgttgtgcaccatggtgtagaacatacgcaagatggcttccggctggcgcataaatagtgtttcatcacgcaggtcgattagcgtaccgcgtagctgaaactcatcgtcgattggacgtggtttttcgtcggcgggaagggcgaggatggcttcatcgaacagttgcagcagcatctggttgagttcactgacgcggcgtgtaacgcggaagtaatccttcatcatccgctcgaccggttcgttaccttcaccactgtaattcagacgctgggcgacgctaagctggcgatcgaataacaggcgattatcgtaacggctgacgaccagatgcagggcaaagcgaatacgccacaatatatgcagacattcgtttaattccgcccgctccgctgaggttaagaagccaaacccgaccatttcatccagcgatgttgcgccaaaatgacggcgggccacccattgcagagtgtggatatcgcgcaagccgccagggctgcttttgatgtctggttcaaggttgtagctggtgccatggtaacgctgatggcgctggttctgttcttcaactttcgccgcgtagaacttgtcggaaggccagaatccttcgctgaaaatatgtttttgcagttcgaggaacagcgcaacatcgccaattaataagcgggattcgattaaattggtggcgacggttaaatccgataacccttccagcatgcactcttcaagcgtgcgcacgctatgaccgacttccagctttacatcccagagcagcgttaacagctcgcccactttttgcgcctgatcgtccgggagctttttacggcttaaaatcagtaaatcgacgtctgaaagtggatgcagctcgccacgaccgtagccaccgacggcgaccaatgccaggtcggcaatctggctgaatcccgcttcaatccataatcgttgcaggagctggtcgataaactcggtgcgcgcctcaatcaactgttctgcagagatcccattgtcaaaggcatcacccagccaacgctggaaagtatcgatatgggcttttatcccaccgacggttaattcatcacggggccagacgcatggattttgcggttgaccgggcagggtggggagagcggtgtttgcgtactgttctggaagggtattcattgtgcgccacccataagattaaattatcgcattaaaaaagccggcattcgccggcttcatcttattcgtcgtgcgagattatcgccgggatggtgtcatccttgcgtagcgtcagaatttcgcagccgttatcagtcaccacaatagtatgctcatattgtgcagacaagctgcgatctttggtttttaccgtccagccatctttcatggtgcggatctcttttttacccgcgttgaccattggctcgatggtgaacgtcatcccaggtttcagtacgacgttggtttcacgggagtcatagtgcagcacctgcggttcttcatggaagccgcgaccaataccgtgtccgcaatattcacgaacgacggagaagccttctgcttcgacaaatttctgaatcgccgcaccgatttcgcgcagattaatgcctggttttaccatgcgtagcgccaggtacaggctttcttgcgtgatgcggcacagacgttcgcccatgatggtcggcttaccgacgataaacattttcgaggtatcgccgtggaaaccatctttgattacggtgacatcaatgttaacgatatcgccatctttcagcagcttagcatcgtccgggataccgtggcacaccacttcattaatagagatgcaaacggatttcggatagccgtgatagccgaggcaggcagaaaccgcgtgttgttcattaacaatgtaatcattacagatgcgatccagctcgccggtgctgacgcccggtttaacatacggttcgatcatctccagcacttcggcagccagtcggccagcgacgcgcattttttcgatatcttctggggtcttgattgagatagccattaattctgtccatcagcgtcggtgataccgacaatatatatgtaagtgccgtcaatggtatcacacccgggcaaattgagaatcattctgaatttcgccaaacgtgccactgaaggttttctataatagaaaattcgacgtctgatgctgtacacagcgccaacaattattggtgtccacgacgtatttgtggtataaagcgcgccggacttccgatccatttcgtatacacagactggacggaagcgacaatctcactttgtgtaacaacacacacgtatcggcacatattccggggtgccctttggggtcggtaatatgggatacgtggaggcataaccccaacttttatatagaggttttaatcatggcaactgtttccatgcgcgacatgctcaaggctggtgttcacttcggtcaccagacccgttactggaacccgaaaatgaagccgttcatcttcggtgcgcgtaacaaagttcacatcatcaaccttgagaaaactgtaccgatgttcaacgaagctctggctgaactgaacaagattgcttctcgcaaaggtaaaatccttttcgttggtactaaacgcgctgcaagcgaagcggtgaaagacgctgctctgagctgcgaccagttcttcgtgaaccatcgctggctgggcggtatgctgactaactggaaaaccgttcgtcagtccatcaaacgtctgaaagacctggaaactcagtctcaggacggtactttcgacaagctgaccaagaaagaagcgctgatgcgcactcgtgagctggagaaactggaaaacagcctgggcggtatcaaagacatgggcggtctgccggacgctctgtttgtaatcgatgctgaccacgaacacattgctatcaaagaagcaaacaacctgggtattccggtatttgctatcgttgataccaactctgatccggacggtgttgacttcgttatcccgggtaacgacgacgcaatccgtgctgtgaccctgtacctgggcgctgttgctgcaaccgtacgtgaaggccgttctcaggatctggcttcccaggcggaagaaagcttcgtagaagctgagtaataaggcttgataactcccccaaaatagttcgagttgcagaaaggcggcaagctcgagaattcccgggagcttacatcagtaagtgaccgggatgagcgagcgaagataacgcatctgcggcgcgaaatatgaagggggagagcccttatagaccaggtagtacacgtttggttagggggcctgcatatggccccctttttcacttttatatctgtgcggtttaatgccgggcagatcacatctccgaggattttagaatggctgaaattaccgcatccctggtaaaagagctgcgtgagcgtactggcgcaggcatgatggattgcaaaaaagcactgactgaagctaacggcgacatcgagctggcaatcgaaaacatgcgtaagtccggtgctattaaagcagcgaaaaaagcaggcaacgttgctgctgacggcgtgatcaaaaccaaaatcgacggcaactacggcatcattctggaagttaactgccagactgacttcgttgcaaaagacgctggtttccaggcgttcgcagacaaagttctggacgcagctgttgctggcaaaatcactgacgttgaagttctgaaagcacagttcgaagaagaacgtgttgcgctggtagcgaaaattggtgaaaacatcaacattcgccgcgttgctgcgctggaaggcgacgttctgggttcttatcagcacggtgcgcgtatcggcgttctggttgctgctaaaggcgctgacgaagagctggttaaacacatcgctatgcacgttgctgcaagcaagccagaattcatcaaaccggaagacgtatccgctgaagtggtagaaaaagaataccaggtacagctggatatcgcgatgcagtctggtaagccgaaagaaatcgcagagaaaatggttgaaggccgcatgaagaaattcaccggcgaagtttctctgaccggtcagccgttcgttatggaaccaagcaaaactgttggtcagctgctgaaagagcataacgctgaagtgactggcttcatccgcttcgaagtgggtgaaggcatcgagaaagttgagactgactttgcagcagaagttgctgcgatgtccaagcagtcttaattatcaaaaaggagccgcctgagggcggcttctttttgtgcccatcttgtaaattcagctaacccttgtggggctgcgctgaaaagcgacgtacaatgtcgctagtattaattcatttcaatcgttgacagtctcaggaaagaaacatggctaccaatgcaaaacccgtctataaacgcattctgcttaagttgagtggcgaagctctgcagggcactgaaggcttcggtattgatgcaagcatactggatcgtatggctcaggaaatcaaagaactggttgaactgggtattcaggttggtgtggtgattggtgggggtaacctgttccgtggcgctggtctggcgaaagcgggtatgaaccgcgttgtgggcgaccacatggggatgctggcgaccgtaatgaacggcctggcaatgcgtgatgcactgcaccgcgcctatgtgaacgctcgtctgatgtccgctattccattgaatggcgtgtgcgacagctacagctgggcagaagctatcagcctgttgcgcaacaaccgtgtggtgatcctctccgccggtacaggtaacccgttctttaccaccgactcagcagcttgcctgcgtggtatcgaaattgaagccgatgtggtgctgaaagcaaccaaagttgacggcgtgtttaccgctgatccggcgaaagatccaaccgcaaccatgtacgagcaactgacttacagcgaagtgctggaaaaagagctgaaagtcatggacctggcggccttcacgctggctcgtgaccataaattaccgattcgtgttttcaatatgaacaaaccgggtgcgctgcgccgtgtggtaatgggtgaaaaagaagggactttaatcacggaataattcccgtgatggataaataagggtaagattccgcgtaagtatcgcgggggcgtaagtctggttataaggcgttattgttgcaggcagtttggtcacggccagcgcgcagcaaccggagcgtacaaaagtacgtgaggatggcgagcactgcccggggccaaaatggcaaataaaatagcctaataatccagacgattacccgtaatatgtttaatcagggctatacttagcacacttccactgtgtgtgactgtctggtctgactgagacaagttttcaaggattcgtaacgtgattagcgatatcagaaaagatgctgaagtacgcatggacaaatgcgtagaagcgttcaaaacccaaatcagcaaaatacgcacgggtcgtgcttctcccagcctgctggatggcattgtcgtggaatattacggcacgccgacgccgctgcgtcagctggcaagcgtaacggtagaagattcccgtacactgaaaatcaacgtgtttgatcgttcaatgtctccggccgttgaaaaagcgattatggcgtccgatcttggcctgaacccgaactctgcgggtagcgacatccgtgttccgctgccgccgctgacggaagaacgtcgtaaagatctgaccaaaatcgttcgtggtgaagcagaacaagcgcgtgttgcagtacgtaacgtgcgtcgtgacgcgaacgacaaagtgaaagcactgttgaaagataaagagatcagcgaagacgacgatcgccgttctcaggacgatgtacagaaactgactgatgctgcaatcaagaaaattgaagcggcgctggcagacaaagaagcagaactgatgcagttctgatttcttgaacgacaaaaacgccgctcagtagatccttgcggatcggctggcggcgttttgctttttattctgtctcaactctggatgtttcatgaagcaactcaccattctgggctcgaccggctcgattggttgcagcacgctggacgtggtgcgccataatcccgaacacttccgcgtagttgcgctggtggcaggcaaaaatgtcactcgcatggtagaacagtgcctggaattctctccccgctatgccgtaatggacgatgaagcgagtgcgaaacttcttaaaacgatgctacagcaacagggtagccgcaccgaagtcttaagtgggcaacaagccgcttgcgatatggcagcgcttgaggatgttgatcaggtgatggcagccattgttggcgctgctgggctgttacctacgcttgctgcgatccgcgcgggtaaaaccattttgctggccaataaagaatcactggttacctgcggacgtctgtttatggacgccgtaaagcagagcaaagcgcaattgttaccggtcgatagcgaacataacgccatttttcagagtttaccgcaacctatccagcataatctgggatacgctgaccttgagcaaaatggcgtggtgtccattttacttaccgggtctggtggccctttccgtgagacgccattgcgcgatttggcaacaatgacgccggatcaagcctgccgtcatccgaactggtcgatggggcgtaaaatttctgtcgattcggctaccatgatgaacaaaggtctggaatacattgaagcgcgttggctgtttaacgccagcgccagccagatggaagtgctgattcacccgcagtcagtgattcactcaatggtgcgctatcaggacggcagtgttctggcgcagctgggggaaccggatatgcgtacgccaattgcccacaccatggcatggccgaatcgcgtgaactctggcgtgaagccgctcgatttttgcaaactaagtgcgttgacatttgccgcaccggattatgatcgttatccatgcctgaaactggcgatggaggcgttcgaacaaggccaggcagcgacgacagcattgaatgccgcaaacgaaatcaccgttgctgcttttcttgcgcaacaaatccgctttacggatatcgctgcgttgaatttatccgtactggaaaaaatggatatgcgcgaaccacaatgtgtggacgatgtgttatctgttgatgcgaacgcgcgtgaagtcgccagaaaagaggtgatgcgtctcgcaagctgaggataatccggctacagagagtcgcgctatttgttagcgtagggcttcagtgatatagtctgcgccatctgatcgtaagtagttggctttataaggtcagatatgccgtggttttacacggcttttttttgtataggcttcagtattcctgagtaccgtaaaccctgtcagggaataaaaaacgcgtgatgttgtctgctactcaaccacttagcgaaaaattgccagcgcatggctgccgtcatgttgcgatcattatggacggcaatggccgctgggcaaaaaagcaagggaagattcgtgcctttgggcataaagccggggcaaaatccgtccgccgggctgtctcttttgcggccaacaacggtattgaggcgttaacgctgtatgcctttagtagtgaaaactggaaccgaccagcgcaggaagtcagtgcgttaatggaactgtttgtgtgggcgctcgatagcgaagtaaaaagtctgcaccgacataacgtgcgtctgcgtattattggcgataccagtcgctttaactcgcgtttgcaagaacgtattcgtaaatctgaagcgctaacagccgggaataccggtctgacgctgaatattgcggcgaactacggtggacgttgggatatagtccagggagtcaggcaactggctgaaaaggtgcagcaaggaaacctgcaaccagatcagatagatgaagagatgctaaaccagcatgtctgtatgcatgaactggcccctgtagatttagtaattaggactgggggggagcatcgcattagtaactttttgctttggcaaattgcctatgccgaactttactttacagatgttctctggcccgatttcgatgaacaagactttgaaggggcgttaaatgcctttgctaatcgagagcgtcgtttcggcggcaccgagcccggtgatgaaacagcctgatgggggtcgcttttgctgaagtatcgcctgatatctgcttttgtgttaatacccgtcgtcatcgcggcgttgtttctgttgccgccggtggggttcgccattgtaacgctggtggtctgcatgctggcagcgtgggaatggggacagcttagcggttttaccactcgttcgcagcgagtatggttggcggtgttatgcgggttattgttggcgctgatgctttttctgttgccggaatatcaccgaaatattcatcaaccgctggttgaaatctcactttgggcttcgctgggttggtggattgtcgcgctattgctggtgctgttttacccaggttccgcagcaatctggcgtaactctaaaacattgcgccttatttttggcgtgctaaccattgttcccttcttctggggcatgctggcgttacgggcctggcactatgacgagaatcattacagtggcgcaatatggctgctctatgtcatgatcctggtatggggcgctgactccggcgcatatatgtttggcaaattgtttggtaaacataagctggcaccgaaggtttctccgggtaaaacctggcaaggctttatcggtggactcgctactgcagcggtaatctcatggggttatggcatgtgggcgaatctcgacgtcgctcccgtcaccttactcatttgctctattgtcgcagcgttagcctcagtgctcggcgatctgaccgagagtatgtttaagcgtgaagcaggaattaaggacagcggtcatttaattccaggacacggtggtattttagatcgtattgatagcctgacggctgcggtaccggtctttgcttgcttgttgttactggtattcaggacgctttaacggaaggtaatatgctgagttttctctgggatttggcttcgttcatcgttgcactgggtgtacttatcaccgtgcatgaatttggtcatttctgggttgcccggcgttgtggtgttcgcgttgagcgtttctcaatagggtttggtaaggcgctctggcggcgaactgataagctcggcaccgaatatgttatcgccctgatcccgttgggcggttatgtcaaaatgctggatgagcgcgcagaaccggtcgttccggaactccgccaccatgccttcaataataaatctgtcggccaacgagcggcgattattgccgcaggtccggttgcaaacttcatttttgctatctttgcctactggctggtttttattattggtgtgcctggcgtacgtccggtggttggcgaaatagcagccaattcgatagctgcggaagcacaaattgcaccaggtacggaactaaaagccgtagatggtatcgaaacgcctgattgggatgccgtgcgtttgcagttggtcgataaaattggcgatgaaagcaccaccattacagtagcgccatttggcagcgaccaacggcgggatgtaaagctcgatttacgtcactgggcgtttgagcctgataaagaagatccggtatcttcgctggggattcgtcctcgtgggccgcaaattgaacctgtactggaaaatgtgcagccaaactcggcggcaagcaaggcaggtttgcaagcaggcgacaggatcgttaaagtcgatggtcagcccttaacgcagtgggtgacctttgtgatgcttgtccgggataacccgggtaaatccttagcgttagaaatcgaaaggcaggggagtcccttgtctttgacattaatcccggagagtaaaccgggtaatggtaaagcgattggttttgtcggtattgagccgaaagtcattcctttgccagatgagtataaagttgtacgccagtatgggccgttcaacgccatcgtcgaagccacggacaaaacgtggcagctgatgaagctgacggtcagtatgctgggaaaattgatcaccggtgatgtgaaactgaacaacctcagtgggccgatctctatcgccaagggggctgggatgacagcggaactcggggttgtttattacctgccgtttcttgcgcttattagcgtgaacttagggataattaacctgtttccgttgcccgtacttgacggggggcatctgctgttccttgcgatcgaaaagatcaagggcggaccggtatccgagcgggttcaagacttttgttatcgcattggctcgattctgctggtgctgttaatggggcttgcacttttcaatgatttctctcggttatgagagttagttaggaagaacgcataataacgatggcgatgaaaaagttgctcatagcgtcgctgctgtttagcagcgccaccgtatacggtgctgaagggttcgtagtgaaagatattcatttcgaaggccttcagcgtgtcgccgttggtgcggccctcctcagtatgccggtgcgcacaggcgacacggttaatgatgaagatatcagtaataccattcgcgctctgtttgctaccggcaactttgaggatgttcgcgtccttcgtgatggtgatacccttctggttcaggtaaaagaacgtccgaccattgccagcattactttctccggtaacaaatcggtgaaagatgacatgctgaagcaaaacctcgaggcttctggtgtgcgtgtgggcgaatccctcgatcgcaccaccattgccgatatcgagaaaggtctggaagacttctactacagcgtcggtaaatatagcgccagcgtaaaagctgtcgtgaccccgctgccgcgcaaccgtgttgacctaaaactggtgttccaggaaggtgtgtcagctgaaatccagcaaattaacattgttggtaaccatgctttcaccaccgacgaactgatctctcatttccaactgcgtgacgaagtgccgtggtggaacgtggtaggcgatcgtaaataccagaaacagaaactggcgggcgaccttgaaaccctgcgcagctactatctggatcgcggttatgcccgtttcaacatcgactctacccaggtcagtctgacgccagataaaaaaggtatttacgtcacggtgaacatcaccgaaggcgatcagtacaagctttctggcgttgaagtgagcggcaaccttgccgggcactccgctgaaattgagcagctgactaagatcgagccgggtgagctgtataacggcaccaaagtgaccaagatggaagatgacatcaaaaagcttctcggtcgctatggttatgcctatccgcgcgtacagtcgatgcccgaaattaacgatgccgacaaaaccgttaaattacgtgtgaacgttgatgcgggtaaccgtttctacgtgcgtaagatccgttttgaaggtaacgatacctcgaaagatgccgtcctgcgtcgcgaaatgcgtcagatggaaggtgcatggctggggagcgatctggtcgatcagggtaaggagcgtctgaatcgtctgggcttctttgaaactgtcgataccgatacccaacgtgttccgggtagcccggaccaggttgatgtcgtctacaaggtaaaagagcgcaacaccggtagcttcaactttggtattggttacggtactgaaagtggcgtgagcttccaggctggtgtgcagcaggataactggttaggtacaggttatgctgttggtatcaacgggaccaaaaacgattaccagacctatgctgaactgtcggtaaccaacccgtacttcaccgtagatggcgtaagcctcggtggtcgtctcttctataatgacttccaggcagatgacgccgacctgtccgactataccaacaagagttatggtacagacgtgacgttgggcttcccgattaacgaatataactcgctgcgtgcaggtctgggttatgtacataactccctgtccaacatgcagcctcaggttgcgatgtggcgttatctgtactctatgggtgaacatccgagcacctctgatcaggataacagcttcaaaacggacgacttcacgttcaactatggttggacctataacaagcttgaccgtggttacttcccgacagatggttcacgtgtcaacctgaccggtaaagtgaccattcctggatcggataacgaatactacaaagtgacgttagacacggcgacttatgtgccgatcgatgacgatcacaaatgggttgttctggggcgtacccgctggggttatggtgatggtttaggcggcaaagagatgccgttctacgagaacttctatgccggtggttccagcaccgtgcgtggcttccagtccaataccattggtccgaaagcagtttacttcccgcatcaggccagtaattatgatccggactatgattacgaatgtgcgactcaggacggcgcgaaagacctgtgtaaatcggatgatgctgtaggcggtaacgccatggcggttgccagcctcgagttcatcaccccgacgccgtttattagcgataagtatgctaactcggttcgtacttccttcttctgggatatgggtaccgtttgggatacaaactgggattccagccaatattctggatatccggactatagtgatccaagcaatatccgtatgtctgcgggtatcgcattacaatggatgtccccattggggccgttggtgttctcctacgcccagccgttcaaaaagtacgatggagacaaggcagaacagttccagtttaacatcggtaaaacctggtaagtgttctccacaaaggaatgtagtggtagtgtagcgatgactttaggcgatcaatataagatcgccgggccacgcaaagaactgcaccctccggtgcaaatgggatggtaaggagtttattgtgaaaaagtggttattagctgcaggtctcggtttagcactggcaacttctgctcaggcggctgacaaaattgcaatcgtcaacatgggcagcctgttccagcaggtagcgcagaaaaccggtgtttctaacacgctggaaaatgagttcaaaggccgtgccagcgaactgcagcgtatggaaaccgatctgcaggctaaaatgaaaaagctgcagtccatgaaagcgggcagcgatcgcactaagctggaaaaagacgtgatggctcagcgccagacttttgctcagaaagcgcaggcttttgagcaggatcgcgcacgtcgttccaacgaagaacgcggcaaactggttactcgtatccagactgctgtgaaatccgttgccaacagccaggatatcgatctggttgttgatgcaaacgccgttgcttacaacagcagcgatgtaaaagacatcactgccgacgtactgaaacaggttaaataagtaatgccttcaattcgactggctgatttagcgcagcagttggatgcagaactacacggtgatggcgatatcgtcatcaccggcgttgcgtccatgcaatctgcacaaacaggtcacattacgttcatggttaacccaaaataccgtgagcatttaggcttgtgccaggcgtccgcggttgtcatgacccaggacgatcttcctttcgcgaaaagtgccgcactggtagtgaagaatccctacctgacttacgcgcgcatggcgcaaattttagataccacgccgcagcccgcgcagaacattgcacccagtgcggtgatcgacgcgacggcgaagctgggtaacaacgtatcgattggcgctaacgcggtgattgagtccggcgttgaactgggcgataacgtgattatcggtgccggttgcttcgtaggtaaaaacagcaaaatcggtgcaggttcgcgtctctgggcgaacgtaaccatttaccatgagatccagatcggtcagaattgcctgatccagtccggaacagtggtaggcgcagacggctttggttatgccaacgatcgtggtaactgggtgaagatcccacagattggtcgcgtaattattggcgatcgcgtggagatcggtgcctgcacaaccatcgatcgcggcgcgctggatgacactattattggcaatggcgtgatcattgataaccagtgccagattgcacataacgtcgtgattggcgacaatacggcggttgccggtggcgtcattatggcgggcagcctgaaaattggtcgttactgcatgatcggcggagccagcgtaatcaacgggcatatggaaatatgcgacaaagtgacggttacgggcatgggtatggtgatgcgtcccatcactgaaccaggcgtctattcctcaggcattccgctgcaacccaacaaagtctggcgcaaaaccgctgcactggtgatgaacattgatgacatgagcaagcgtctgaaatcgcttgagcgcaaggttaatcaacaagactaacgttccatcttttgttcgccaaactttacggcctgtctcattcttacgattgcggcaggccgtgttattattgtcgtttcttatattttgacaggaagagtatcttgactactaacactcatactctgcagattgaagagattttagaacttctgccgcaccgtttcccgttcttactggtggatcgcgtgctggattttgaagaaggtcgttttctgcgcgcagtaaaaaatgtctctgtcaatgagccattcttccagggccatttccctggaaaaccgattttcccgggtgtgctgattctggaagcaatggcacaggcaacaggtattctggcgtttaaaagcgtaggaaaactggaaccgggtgagctgtactacttcgctggtattgacgaagcgcgcttcaagcgcccggtcgtgcctggcgatcaaatgatcatggaagtcactttcgaaaaaacgcgccgcggcctgacccgttttaaaggggttgctctggtcgatggtaaagtagtttgcgaagcaacgatgatgtgtgctcgtagccgggaggcctgatacgtgattgataaatccgcctttgtgcatccaaccgccattgtggaagagggcgcgtcaattggcgcgaacgcacacattggtcctttttgtatcgttggaccccatgtcgaaattggtgagggtaccgtactgaaatctcacgttgtcgtgaatggtcatactaaaattggccgcgataatgagatttatcagttcgcctccatcggcgaagttaaccaggatctgaaatatgctggcgaaccgacccgtgtggaaatcggcgatcgtaaccgcattcgcgaaagcgtcaccattcatcgtggcacagtccagggcggtggattgacgaaggtgggcagcgacaacttactgatgatcaacgcgcacattgcgcacgattgtacggtaggtaaccgctgtattctcgccaacaacgcaacgctggcgggtcacgtatcggttgacgacttcgcgatcatcggcggcatgaccgcagtccatcagttctgcatcattggtgcgcacgtgatggttggcggctgctccggtgtggcgcaggacgtccctccttatgtcattgcgcagggtaaccacgcaacgccgttcggtgtcaatatcgaagggctgaagcgccgcggattcagccgtgaggcgattaccgctatccgcaatgcgtataagctgatttatcgtagcggtaaaacgctcgatgaagtgaaaccggaaattgctgaactggcggaaacatatccggaagtgaaagcctttaccgatttctttgcacgctcaacgcgcggtctgattcgttaatgactgaacagcgtccattaacgattgccctggtcgccggagaaacctccggcgatatcctgggggccggtttaatccgcgctctgaaagaacatgtgcccaacgcccgctttgttggtgttgccgggccacgaatgcaggctgaaggctgcgaagcctggtacgaaatggaagaactggcggtgatgggcattgttgaagtgctcggtcgtctgcgtcgcttactgcatattcgtgccgatctgacaaagcgttttggcgaactgaagccagatgtttttgttggtattgatgcgcctgacttcaatattactcttgaaggtaacctcaaaaagcagggtatcaaaaccattcattacgtcagtccgtcagtctgggcgtggcgacagaaacgtgttttcaaaataggcagagccaccgatctggtgctcgcatttctgcctttcgaaaaagcgttttatgacaaatacaacgtaccgtgccgctttatcggtcataccatggctgatgccatgccattagatccagataaaaatgccgcccgtgatgtgctggggatccctcacgatgcccactgcctggcgttgctaccggggagccgtggtgcagaagttgaaatgcttagtgccgatttcctgaaaacggcccagcttttgcgccagacatatccggatctcgaaatcgtggtgccactggtgaatgccaaacgccgcgagcagtttgaacgcatcaaagctgaagtcgcgccagacctttcagttcatttgctggatgggatgggccgtgaggcgatggtcgccagcgatgcggcgctactggcgtcgggtacggcagccctggagtgtatgctggcgaaatgcccgatggtggtgggatatcgcatgaagccttttaccttctggttggcgaagcggctggtgaaaactgattatgtctcgctgccaaatctgctggcgggcagagagttagtcaaagaattattgcaggaagagtgtgagccgcaaaaactggctgcggcgctgttaccgctgttggcgaacgggaaaaccagccacgcgatgcacgataccttccgtgaactgcatcagcagatccgctgcaatgccgatgagcaggcggcacaagccgttctggagttagcacaatgatcgaatttgtttatccgcacacgcagctggttgcgggtgtggatgaagtcggacgcgggccgttagttggcgcggtcgtcaccgctgcggtgatccttgacccggcgcgcccgattgccgggctgaatgattccaaaaagctgagcgaaaaacgccgtctggcgctctatgaagagatcaaagagaaagcgttgagctggagtctgggccgcgcggaaccccacgaaatcgacgagctgaacattcttcatgcgaccatgctggcgatgcagcgtgccgtcgctgggctgcatattgcgccggaatatgtgttgattgatggtaaccgctgcccgaaattaccgatgcctgcgatggctgtggtgaaaggcgatagccgcgtaccggaaatcagtgccgcgtctatcctggcgaaagtgacgcgtgacgccgaaatggcggcgctggatattgttttcccgcaatatggttttgcccaacacaaagggtacccaaccgcttttcatctggaaaaactggctgaacacggcgcgaccgaacaccatcggcgcagctttgggcctgtcaaacgcgcactgggacttgcgtcctgattcttgtgtcgagattaagtaaaccggaatctgaagatgtctgaaccacgtttcgtacacctgcgggtgcacagcgactactcgatgatcgatggcctggccaaaaccgcaccgttggtaaaaaaggcggcggcgttgggtatgccagcactggcgatcaccgatttcaccaacctttgtggtctggtgaagttctacggagcgggacatggcgcagggattaagcctatcgtcggggcagattttaacgtccagtgcgacctgctgggtgatgagttaacccacctgacggtactggcggcgaacaataccggctatcagaatctgacgttgctgatctcaaaagcgtatcagcgcgggtacggtgccgccgggccgatcatcgatcgcgactggcttatcgaattaaacgaagggttgatccttctttccggcggacgcatgggcgacgtcggacgcagtcttttgcgtggtaacagcgcgctggtagatgagtgtgtcgcgttttatgaagaacacttcccggatcgctattttctcgagctgatccgcaccggcaggccggatgaagaaagctatctgcacgcggcggtggaactggcggaagcgcgcggtttgcccgtcgtggcgaccaacgacgtgcgctttatcgacagcagcgactttgacgcacacgaaatccgcgtcgcgatccacgacggctttaccctcgacgatcctaaacgcccgcgtaactattcgccgcagcaatatatgcgtagcgaagaggagatgtgtgagctgtttgccgacatccccgaagcccttgccaacaccgttgagatcgccaaacgctgtaacgtaaccgtgcgtcttggtgaatacttcctgccgcagttcccgaccggggacatgagcaccgaagattatctggtcaagcgtgcaaaagagggcctggaagagcgtctggcctttttattccctgatgaggaagaacgtcttaagcgccgcccggaatatgacgaacgtctggagactgaacttcaggttatcaaccagatgggcttcccgggctacttcctcatcgttatggaatttatccagtggtcgaaagataacggcgtaccggtagggccaggccgtggctccggtgcgggttcactggtggcctacgcgctgaaaatcaccgacctcgatccgctggaatttgacctgctgttcgaacgtttccttaacccggaacgtgtctccatgcctgacttcgacgttgacttctgtatggagaaacgcgatcaggttatcgagcacgtagcggacatgtacggtcgtgatgcggtatcgcagatcatcaccttcggtacaatggcggcgaaagcggtgatccgcgacgtaggccgcgtgctggggcatccgtacggctttgtcgatcgtatctcgaaactgatcccgcccgatccggggatgacgctggcgaaagcgtttgaagccgagccgcagctgccggaaatctacgaagcggatgaagaagttaaggcgctgatcgacatggcgcgcaaactggaaggggtcacccgtaacgccggtaagcacgccggtggggtggttatcgcgccgaccaaaattaccgattttgcgccgctttactgcgatgaagagggcaaacatccggtcacccagtttgataaaagcgacgttgaatacgccggactggtgaagttcgacttccttggtttgcgtacgctcaccatcatcaactgggcgctggagatgatcaacaagcggcgggcgaagaatggcgagccgccgctggatatcgctgcgatcccgctggatgataagaaaagcttcgacatgctgcaacgctcggaaaccacggcggtattccagcttgaatcgcgcggcatgaaggacctgatcaagcgtctacaacctgactgcttcgaagatatgatcgccctagtggcactgttccgccccggtccgttgcaatcagggatggtggataactttatcgaccgtaaacatggtcgtgaagagatctcctatccggacgtacagtggcagcatgaaagcctgaaaccggtactggagccaacctacggcattatcctgtatcaggaacaggtcatgcagattgcgcaggtgctttctggttataccctcggtggcgcggatatgctgcgtcgtgcgatgggtaagaaaaagccggaagagatggctaagcaacgttctgtatttgctgaaggtgcagaaaagaacggaatcaacgctgaactggcgatgaaaatcttcgacctggtggagaaattcgctggttacggatttaacaaatcgcactctgcggcctatgctttggtgtcatatcaaacgttatggctgaaagcgcactatcctgcggagtttatggcggcggtaatgaccgccgatatggacaacaccgagaaggtggtgggtctggtggatgagtgctggcggatggggctgaaaatcctgccaccagatataaactccggtctttaccatttccacgtcaacgacgacggcgaaatcgtgtatggtattggcgcgatcaaaggggtcggtgaaggtccgattgaggccatcatcgaagcccgtaataaaggcggctacttccgcgaactgtttgatctctgcgcccgtaccgacaccaaaaagttgaaccgtcgcgtgctggaaaaactgatcatgtccggggcgtttgaccgtcttgggccacatcgcgcagcgctgatgaactcgctgggcgatgcgttaaaagcggcagatcaacacgcgaaagcggaagctatcggtcaggccgatatgttcggcgtgctggccgaagagccggaacaaattgaacaatcctacgccagctgccaaccgtggccggagcaggtggtattagatggggaacgtgaaacgttaggcctgtacctgaccggacaccctatcaaccagtatttaaaagagattgagcgttatgtcggaggcgtaaggctgaaagacatgcacccgacagaacgtggtaaagtcatcacggctgcggggctcgttgttgccgcgcgggttatggtcaccaagcgcggcaatcgtatcggtatctgcacgctggatgaccgttccgggcggctggaagtgatgttgtttactgacgccctggataaataccagcaattgctggaaaaagaccgcatacttatcgtcagcggacaggtcagctttgatgacttcagcggtgggcttaaaatgaccgctcgcgaagtgatggatattgacgaagcccgggaaaaatatgctcgcgggcttgctatctcgctgacggacaggcaaattgatgaccagcttttaaaccgactccgtcagtctctggaaccccaccgctctgggacaattccagtacatctctactatcagagggcggatgcacgcgcgcggttgcgttttggcgcgacgtggcgtgtctctccgagcgatcgtttattaaacgatctccgtggcctcattggttcggagcaggtggaactggagtttgactaatacaggaatactatgagtctgaatttccttgattttgaacagccgattgcagagctggaagcgaaaatcgattctctgactgcggttagccgtcaggatgagaaactggatattaacatcgatgaagaagtgcatcgtctgcgtgaaaaaagcgtagaactgacacgtaaaatcttcgccgatctcggtgcatggcagattgcgcaactggcacgccatccacagcgtccttataccctggattacgttcgcctggcatttgatgaatttgacgaactggctggcgaccgcgcgtatgcagacgataaagctatcgtcggtggtatcgcccgtctcgatggtcgtccggtgatgatcattggtcatcaaaaaggtcgtgaaaccaaagaaaaaattcgccgtaactttggtatgccagcgccagaaggttaccgcaaagcactgcgtctgatgcaaatggctgaacgctttaagatgcctatcatcacctttatcgacaccccgggggcttatcctggcgtgggcgcagaagagcgtggtcagtctgaagccattgcacgcaacctgcgtgaaatgtctcgcctcggcgtaccggtagtttgtacggttatcggtgaaggtggttctggcggtgcgctggcgattggcgtgggcgataaagtgaatatgctgcaatacagcacctattccgttatctcgccggaaggttgtgcgtccattctgtggaagagcgccgacaaagcgccgctggcggctgaagcgatgggtatcattgctccgcgtctgaaagaactgaaactgatcgactccatcatcccggaaccactgggtggtgctcaccgtaacccggaagcgatggcggcatcgttgaaagcgcaactgctggcggatctggccgatctcgacgtgttaagcactgaagatttaaaaaatcgtcgttatcagcgcctgatgagctacggttacgcgtaattcgcaaaagttctgaaaaagggtcacttcggtggcccttttttatcgccacggtttgagcaggctatgattaaggaaggattttccaggaggaacacatgaacatcattgccattatgggaccgcatggcgtcttttataaagatgagcccatcaaagaactggagtcggcgctggtggcgcaaggctttcagattatctggccacaaaacagcgttgatttgctgaaatttatcgagcataaccctcgaatttgcggcgtgatttttgactgggatgagtacagtctcgatttatgtagcgatatcaatcagcttaatgaatatctcccgctttatgccttcatcaacacccactcgacgatggatgtcagcgtgcaggatatgcggatggcgctctggttttttgaatatgcgctggggcaggcggaagatatcgccattcgtatgcgtcagtacaccgacgaatatcttgataacattacaccgccgttcacgaaagccttgtttacctacgtcaaagagcggaagtacaccttttgtacgccggggcatatgggcggcaccgcatatcaaaaaagcccggttggctgtctgttttatgattttttcggcgggaatactcttaaggctgatgtctctatttcggtcaccgagcttggttcgttgctcgaccacaccgggccacacctggaagcggaagagtacatcgcgcggacttttggcgcggaacagagttatatcgttaccaacggaacatcgacgtcgaacaaaattgtgggtatgtacgccgcgccatccggcagtacgctgttgatcgaccgcaattgtcataaatcgctggcgcatctgttgatgatgaacgatgtagtgccagtctggctgaaaccgacgcgtaatgcgttggggattcttggtgggatcccgcgccgtgaatttactcgcgacagcatcgaagagaaagtcgctgctaccacgcaagcacaatggccggttcatgcggtgatcaccaactccacctatgatggcttgctctacaacaccgactggatcaaacagacgctggatgtcccgtcgattcacttcgattctgcctgggtgccgtacacccattttcatccgatctaccagggtaaaagtggtatgagcggcgagcgtgttgcgggaaaagtgatcttcgaaacgcaatcgacccacaaaatgctggcggcgttatcgcaggcttcgctgatccacattaaaggcgagtatgacgaagaggcctttaacgaagcctttatgatgcataccaccacctcgcccagttatcccattgttgcttcggttgagacggcggcggcgatgctgcgtggtaatccgggcaaacggctgattaaccgttcagtagaacgagctctgcattttcgcaaagaggtccagcggctgcgggaagagtctgacggttggtttttcgatatctggcaaccgccgcaggtggatgaagccgaatgctggcccgttgcgcctggcgaacagtggcacggctttaacgatgcggatgccgatcatatgtttctcgatccggttaaagtcactattttgacaccggggatggacgagcagggcaatatgagcgaggaggggatcccggcggcgctggtagcaaaattcctcgacgaacgtgggatcgtagtagagaaaaccggcccttataacctgctgtttctctttagtattggcatcgataaaaccaaagcaatgggattattgcgtgggttgacggaattcaaacgctcttacgatctcaacctgcggatcaaaaatatgctacccgatctctatgcagaagatcccgatttctaccgcaatatgcgtattcaggatctggcacaagggatccataagctgattcgtaaacacgatcttcccggtttgatgttgcgggcattcgatactttgccggagatgatcatgacgccacatcaggcatggcaacgacaaattaaaggcgaagtagaaaccattgcgctggaacaactggtcggtagagtatcggcaaatatgatcctgccttatccaccgggcgtaccgctgttgatgcctggagaaatgctgaccaaagagagccgcacagtactcgattttctactgatgctttgttccgtcgggcaacattaccccggttttgaaacggatattcacggcgcgaaacaggacgaagacggcgtttaccgcgtacgagtcctaaaaatggcgggataacttgccagagcggcttccgggcgagtaacgtgctgttaacaaataaaggagacgttatgctgggtttaaaacaggttcaccatattgcgattattgcgacggattatgcggtgagcaaagctttctactgcgatattcttggtttcacgctgcaaagcgaagtctatcgcgaagcgcgcgactcatggaaaggggatttggcgcttaatgggcaatatgtgattgagcttttctcatttccgttcccgccggaacgacccagccgaccggaagcttgcggtctgcgtcatctggcttttagcgttgatgacatcgatgcggcagtggcgcaccttgaaagccataacgtgaagtgtgaaaccatccgtgtcgatccatacacgcaaaaacgcttcaccttctttaacgatccggacgggctgccgttggaactgtatgagcagtaaggcttgtcatcgccgcatttgcccggtaacgtgccgggcattgctactgtaaaatcgcaccatcatgacactcacgctcaatagacaacttctcacctcacgccagattctggtggcctttagcggcgggcttgactccaccgttctgctgcatcagttggtgcagtggcggacggaaaatccgggtgtcgctctgcgcgctattcatgtgcatcacggtttaagtgccaatgccgatgcctgggttacgcattgcgaaaacgtctgccaacagtggcaggtgccgctggtggtcgaacgcgtacaacttgcgcaagaaggactgggcattgaggcccaggcgcggcaggcacgttatcaggcatttgcccgcaccttgttgcccggtgaagtgctggtcaccgcgcaacatctcgacgatcaatgtgaaacctttctgctggcgctaaaacgcggcagtggccctgccgggctttcggctatggcggaagtctcggagtttgccggaacgcggcttattcgcccgttgctcgcccgcacgcggggggaactggtgcagtgggcgcgtcagtatgatttacgctggattgaagacgaaagtaatcaggacgactcatacgatcgtaactttctgcgcctgcgcgtagtgccgttattgcagcagcgttggccgcattttgccgaagcaacggcccgcagcgccgcactttgtgctgaacaagagagcctgctggatgaactgctggcagatgatttagcacactgtcaatcgccgcaggggacgctgcagattgtgccaatgctggcgatgagtgatgcccgccgcgcggcgattatccgccgctggctggcagggcagaatgcaccgatgccttcccgcgacgcgttggtgaggatctggcaggaagtggcgctggcgcgggaagatgcctcaccctgtttacgtttgggcgcgtttgaaatccgacgctatcagtcgcaactgtggtggattaaatccgtcaccgggcaaagcgaaaacattgtgccgtggcagacgtggcttcaaccgctggaattaccggcggggctgggaagtgtacagcttaatgcgggaggcgatattcgccctccgcgtgcagacgaagcggtcagcgtgcgtttcaaagcgccaggattgctgcatattgtcgggcgtaacggcggacgtaagctaaagaaaatctggcaagagctgggcgtgccgccgtggctacgtgacaccacgccactgctgttttatggcgaaacgctgattgcggcggcaggggtatttgtgacgcaagaaggtgtggctgaaggtgagaatggcgtaagttttgtctggcagaaaacgcttagttaagtgaaagccggataagacgcatcaaacgtcgcatccggcgaaagtcaatcaggattcgcttaccaccaccgtaccgatttccgggtggctaaagctggtaattttatccagacgcagctcgcgggtttcgccagcggcctcgacgaccaggtactccacatttttgcgggagactaaatcactggcttttgcctgcaatttttcgccatctttcagctcaagtgtcagcattaaatgatgctggcaggcgagctcaagattatcgtaatcatcacaattgattggttgatacgtatcattcattgacataatcgctcaccagtaagtttgccgcagcgtatgctgctttttccctgacagcctcagaaagggcgtcgtcggcagccatttcattcagcactttcaaaacgcagcccagcgcgtccggaacgtatcctaagtctccgctggcgatttccgcgtaccgcttgcgtattaactcacaatatttttccacatgccctcctgtcagcactctgacttaaccgtggatgcaagtctaagcctacgaagataaactctgtttcgcaaggtgactataccacactcatttctgcaatatcagcgccgcaactgcacgtattccgttacaatggcctcctgattcgaaaggagttttcttatggcgcttaaagcgacaatttataaagcgacggttaatgtggccgatctcgaccgcaaccagtttctcgatgcctctctgacgctggcgcgccatccttcagaaacccaggagcgtatgatgctgcgcttgctggcgtggctgaaatatgctgatgaacgtctgcaatttacccgtggtttgtgtgccgatgatgagccggaagcgtggctgcgtaacgatcacctgggcattgatttgtggattgagctggggctgccggatgagcggcggattaagaaagcctgcacccaggccgcagaagtggcgctgtttacctataatagtcgggcggcgcaaatctggtggcagcaaaatcagagcaaatgtgtgcagtttgccaatctttccgtctggtatctggacgatgaacaactggcgaaagtaagcgcctttgccgatcgtaccatgacgctgcaggcaacgattcaggatggcgtgatctggttatcggatgataagaataatctggaagtgaacttaaccgcctggcaacaaccttcatgattgtgatttcccgacatgttgctattcccgatggtgagcttgagatcaccgccattcgtgcgcagggcgcgggcgggcagcatgttaataagacctcaacggctattcatctgcgttttgacattcgggcgtccagcctgccagagtattacaaagagcgtctgctcgccgccagccatcatttgatcagcagtgatggcgtgattgtcattaaggcacaggaataccgcagtcaggaactgaaccgcgaagcagctctggcccggctggtggctatgattaaagaattaacaacagaaaaaaaagcccgacgacccacgcggcccacccgtgcatcgaaagagcgcaggctggcatcgaaagcacaaaaatcaagcgtgaaggcgatgcgcggcaaagtgcgcagcggtcgggaataaaaagaaggaatggatggtgaaaaaagcgatagtgacagcgatggctgtaatcagcctctttactctgatgggatgtaataatcgggccgaagtcgatacgctttctccggcgcaggctgccgaactgaaaccgatgccgcaaagttggcgcggcgtgctgccgtgtgccgattgcgaaggaatcgaaacctctctgttcctcgaaaaagacggaacatgggtgatgaatgagcgttatctcggtgctcgtgaagaaccttcctccttcgcttcctacggtacatgggcgcgaaccgctgacaagctggtattaaccgacagcaaaggtgaaaagtcatattatcgggcgaaaggcgatgcgctggagatgctcgatcgtgaaggcaatccgattgaatcgcagttcaactatacgctggaagcggcacaatccagtttacctatgacgccgatgaccctgcggggcatgtatttttatatggctgatgcggcgaccttcactgattgcgcgaccggaaaacgtttcatggtagcgaataacgcagagctggagcgtagctacctggctgcgcgcggtcacagtgaaaaaccggtgttactgtcagtagaaggtcactttacgcttgagggtaatccggataccggtgcgccgactaaagtattggcacccgatacggcagggaaattttaccccaaccaggattgcagtagtttggggcagtaacccgtcttgagacagaaacaaacgcaaaacaggccagaaggatatatttcaacattttgaatttgcacgttttttgtaggccggataaggcgtttacgccgcatccggcaatggtgctcaacgcctgatgcgacgctggcgcgtcttatcatgcctacaacccccctcataccttaaggcggataaggcatttactttatcaccgggtcaaaccaacaaagcgacccgccttgatataaatcccaggcttcaggtgcccaacatactgtaactgcgtttctggcttaaacgcagagacatcaccaatacgcatatgcatcagatcggcagggctaatccagcccgattgcgccagtgtaagtggatgcccggctttggcaaaggcatccgtgacaaattccgaacaaaaccacgactttttgtctccttcgcccacactgcttaactgcgctttcgccaggccgctgacgcactgttggcgaaaatcctcggagaacggattcagtgagcacatctggcgagtcaccataaagggaataaattcgacaatgccgcgatagttataaccgctatctttgattttattggcaaacgcggtgatatctgtggcttgttgcggggtaagatccgggactcgtaagacgaaaagcttatcactatgcttcatcgcttttttaagggaaacgatctggacgccagcgcctgtcgcttctgcaacgttattatcacccagaaagattgcaacgtgactcacagaggaagtgctgaagacgcggattccaaatgaggttaccccaaggcttgaggagaacagcaaatcgccgggtttgagatcaggtgccgttatttcttttattgattgttcggtgaaagagctttgatgctggaatttgacagcccatgtttttgcctcggcatctactgctgtggctgatgggtctggctggctgatatcaacggtacaagccgaaagtaaaagaaagctggggagaaacaggcggcagtacgcctttggtttatccattttatacaatccatgtaaaaaaagggccctgaaattcaggaccctttctggcatcagcctttaatctgtttcaccagatattcgacgatgtcaccagtcttaattaactgtttctcgccgttgcgacgatatttatattcgatatcgtcgttgtcgaggttacggtcgcccagcacaatagtgtgcggaataccgatcagttccatatcagcaaacatcacgcccggacgctctttgcggtcatccagcagcacttcgataccttgtgcacgcagttcgctgtacagtttctcagcaagctcttgtacgcggaaggatttgtgcatgttcatcggcagaatcgccacctggaacggcgcgatagcgtcaggccatacgatgcctcgttcgtcgtagttctgctcaatcgccgcagctaccacacgcgttaccccgataccgtagcaacccatcgtcaggatttggttacggccatcttcaccctgtacggaggctttcagtgcttcggagtacttggtacccagctggaagatgtgaccaacttcgataccacgtttgatcagcagcctaccctggccatccgggcttggatcgccagccaccacgttacggatatctgcaacttccggggtagcgacatcgcgatcccagttgatgccgaagtagtgtttaccatcgatgttagcaccagcagcgaaatcactcatcgccgcaacggtacggtcaatcaccaccggaatcggcatgtttaccggacccagtgaacccggaccggctttaaccacggcacgaatttcttcttcggtcgcgaaagtcagcgggcttgcaacctgcggcagtttttctgctttaacttcgttcagctcgtgatcaccgcgcaccagcagcgcaacctgcgggaagctgctgccttcaaccgctttaaccagcagagtcttaaccgttttctcaatcggcagattgaactgttcaaccagttccgcgatggttttcgcgttcggcgtatcaaccagcgtcatttcctgggtagcagcagcgcgcggttctttcggcgcgatagcttctgccagttcaatgttcgctgcatagtcagaggtgtcggagaagaccacatcgtcttcaccgctctgcgccagcacctggaattcgtgagaggcgctgccgccgatagaaccggtgtcggcttgtacggcgcggaaatccagccccatgcggctgaagattttgctgtaggccgcatacattgcatcgtaggtttcctgcagggattcctgagaagtatggaaagagtaagcatctttcatcaggaattcgcgggaacgcatgacgccgaaacgcggacgcacttcgtcgcggaacttggtctggatctgatagaagttcagcggcagctgtttgtaagagctaagctcgttacgaatcaggtcagtgataacttcttcatgagttgggccgagtacgaacggacgctcgccacggtcaacaaaacgcagcagttccggaccgtactgttcccaacgaccactctcttgccacaaatcggctggctgaaccaccggcatcgacacctcgatcgcaccggcgttgttcatctcttcacgcacgatgttttcgacttttttcagaacgcgcacgccggtcggcagccaggtatataacccggaggccagcttgcggatcatcccggcgcgcagcatcagctgatggctgatcacctcggcgtcggcaggtgtctccttgagagtggagagcaggtattggctagtacgcatgttgttacggttccagttggaaggtagaacaggctcaaggcgagcctgggacaaaaaaaagtgatttagtttaccagtgcaaaagaaatgtcaaaagagaagggcgtgaatttaacgcggttccagcgcaaagacttcaaaacctgcgtcggtgacgcgccagcgaacgttaaaatcatgtagccagacggcataggttttgcccgtttcctcacctttacgataggccgggcgcgggtcctgcgccagtacttcgcggataaacagcgttaactgcggataacgcttctccagcgtcaaaagctgcttttcgacctctgcggtaaaactcaccgccatctctgcagctggcgcactttgcgcatagctggcactggcatcgggaagcgattcggcaaaggggagatacggtttgatatccactaccggcgtaccatcgaccagatccagactgccgagcttcagaatcacgctgtctttatggcaaacaacctctttcagctctaccagcgacatgccaattgggttagggcggaaagtagagcgtgttgcgaaaacccccattctggcgttaccgccgaggcgcggtggacgcacagtcggacgccagccgccttccatcgtttgatgaaagacgaaaaggatccataaatggctgaacgcttccaggccgcgaacggcgtcggcctggttgtagggagcaatgagatgcagttcgccgttggcgctttttaccagacctggctggcgcggaacggcgaacttttctttatagggcgagcgaataacgcctatttgctcgaactggaaactgctcatttcgccgtaatgttaagcgcagaaccgatacatacagcctgacgatagcagcctggcgtaccgctggtgacttcgcagctatgcagtaatacagcattggctttcattttagaggcgttgatttgcatccgcttacgtgcggttggaatgctcggcggagagtcctgattagaggcctggcaagagtcgccactgacttcaccgagatcgcggaacggtttgccgactaattcttctgcattggtataaattcggaccggcgtggcgcgcggcgctttcggttttgcaggctccgctttcggctggggtgcagtgctttgaacgggttcgacaggggatctgcttaacatggaacagccgcttagcatgagtgctactaaacagatcggtaaagcacgcatagtatttcctcaatgtatgatcaaaacgtcaatattgaatcaggagcttgtaaaaatgacaagacgggcaagcgcccgtcctgaatgatattacaaattgtggaaacagcctaaaaattaccagcctttaacagctccgccgttaaacactttgtttgctgcttcgtaaacttcgtcagactgataagcctggacgaatttcttcacgttctcggcgtctttgttatcttcacgcgtcacgatcaggtttacgtacggggactctttatcttcaacaaagataccgtctttcgccggagtcaggccaatctggctggcataggtggtattgataactgccagagcgatttgcgcgtcgtccagagaacgcggcagttgcggtgcttccagttcaacaattttcagatttttggggttctcaacaacatcaagaacggtcggcagcaggccaacgccatctttcagtttgatcaagcccactttttgcagcagcagcagtgaacgaccaaggttagttgggtcgtttggcacggcaacctgcgaaccatcctgcagttcatccagtgatttgattttcttggagtaaccagcaatcggataaacaaaagtgttgcctactgcgaccagtttgtagccacgatctttcagttgctgatcaaggtacggtttatgctggaaggcgttggcgtcgatatcgcctttgctcaatgcttcgtttggcagaacatagtcgttgaaggttaccagctcaacgtccaggccatatttgtctttcgcaactttctgcgcgacttctgcaacctgctgttcggcaccaacaatcacgccgactttaatgtggtttggatctttttcatcctgaccgcagcctaccagtgccagtgatccgatcagggctcccactgccgcaaaggttttgaatttgaacgccataccttattccttcttcaattatttatgttgtgttgaacgttacttgcgagtgacagcccggacgatgcggtcgcctgcgaactgaattaaataaaccagaatgaccagcaataccagtaccgtattcatcaccgtcgcgttatagccgatgtagccatactgatagccaatctgacctaaaccaccggcaccgactgcaccacccatcgcggaataaccgaccagggtaatcagggtgatagttgccgcattcaccagacccggcagcgcttccggtaacagcaccttacggacgatctgcatcggcgtggcacccattgcgcgggaagcttcaattaacccggttgggatctccagcagagcgttctcgaccatacgggcaataaacggtgctgcaccaacggttaacggaacaatcgctgcctgcaaaccaatcgatgtaccgacaataacgcgggtaaacggaatcatccatacaagcaagataatgaacgggatggaacggaaaatgttcacaatcgcagaaacggtacgatacagcttcgcgttagcaataatttgccccggacgcgtgacataaagcagaacgccaaccggcagaccaatcacaaagccaaaaaaaccggatacgaaggtcattgccagcgtttcccatacgccacgaaccagcagccacatcatcggctcagacataacccagtacctctacttttacatggtgttcctgcagccaggcaatggcggcttgcgtatcttgttgtgtgccgtgcatttcagtcagcatgatgccgaacttaacgccaccggcgtaatccatctgcgcgctaataatgttgttgttgacgttgaaacgacgcgcggtttcagaaagcagtggggcatcgaccgattgaccggtaaactccagacgcagcatcggcacgcagtcagtaaatggctccgcttgcagacgttcctggtaatcttccgggatatccagatgcagggtcgactgaataaacttctgcgccagcggcgttttcggatgcgagaacacttcacttaccgtgtcctgctcgatcagttctccattgctgatgaccgccacgcaatcacaaatgcgcttcacaacgtccatttcgtgggtgatcaacagaatcgtcaaccccagacggcggttgatgtctttcagcagttcgagaatagaacgtgtcgttgccgggtccagcgcgctggtggcttcatcacacagcaatactttgggattgctggctaacgcacgggcaattgccacacgttgtttctgcccaccggaaagattcgacgggtagctatcatgcttatcgccaagaccaaccaatgacagcaattccgtcacgcgacgtttgacctcgtctttcggtgtgttgtccagctccagcggcagagccacgttgccaaaaacagtacgcgaagagagcaggttaaaatgctggaaaatcataccaatctggcggcgagctttggtcaactcggattctgacagcgtggtcagttcctggccatcgaccagcacgctaccctcggttgggcgctccagcaggtttacacaacgtataagcgtactcttacccgcgcctgaggcaccgataacgccataaatttgtccagctggcacatgcaggctgacgttgttcaacgcctggatggtgcgggtgccctggtggaacactttggtgatattcgaaagttttatcattgattatttattatcgtcattaagttagtcgtggcatctcgaatgcctgaaacgggcaacgccgtcaatgaaatggatgttaaggcatccagacgtctaaatcaatcaggtttatgcgaagagcactttcttgcaggtcgaaacatgcgatactagcgtcacatgccttattaaggagctataaaaggtggcgaagagcgtacccgcaatttttcttgaccgtgatggcaccattaatgtcgatcacggctatgtccatgagatcgacaactttgaatttatcgacggtgttattgacgccatgcgcgagctaaaaaaaatgggctttgcgctggtggtagtaaccaaccagtctggcattgctcgcggtaaatttaccgaagcacagtttgaaacgctgaccgagtggatggactggtcgctggcggaccgagatgtcgatctggatggtatctattattgcccgcatcatccgcagggtagtgttgaagagtttcgccaggtctgcgattgccgcaaaccacatccggggatgcttttgtcagcacgcgattatttgcatattgatatggccgcttcttatatggtgggcgataaattagaagatatgcaggcagcggttgcggcgaacgtgggaacaaaagtgctggtgcgtacgggtaaacctattacgcctgaagcagaaaacgcggcggattgggtgttaaatagcctggcagacctgccgcaagcgataaaaaagcagcaaaaaccggcacaatgattaaaagatgagcggttgaaataaaaatgcatttttccgcttgtcttcctgagccgactccctataatgcgcctccatcgacacggcggatgtgaatcacttcacacaaacagccggttcggttgaagagaaaaatcctgaaattcagggttgactctgaaagaggaaagcgtaatatacgccacctcgcgacagtgagctgaaagccgcgtcgcaactgctctttaacaatttatcagacaatctgtgtgggcactcgaagatacggattcttaacgtcgcaagacgaaaaatgaataccaagtctcaagagtgaacacgtaattcattacaaagtttaattctttgagcatcaaacttttaaattgaagagtttgatcatggctcagattgaacgctggcggcaggcctaacacatgcaagtcgaacggtaacaggaagaagcttgcttctttgctgacgagtggcggacgggtgagtaatgtctgggaaactgcctgatggagggggataactactggaaacggtagctaataccgcataacgtcgcaagaccaaagagggggaccttcgggcctcttgccatcggatgtgcccagatgggattagctagtaggtggggtaacggctcacctaggcgacgatccctagctggtctgagaggatgaccagccacactggaactgagacacggtccagactcctacgggaggcagcagtggggaatattgcacaatgggcgcaagcctgatgcagccatgccgcgtgtatgaagaaggccttcgggttgtaaagtactttcagcggggaggaagggagtaaagttaatacctttgctcattgacgttacccgcagaagaagcaccggctaactccgtgccagcagccgcggtaatacggagggtgcaagcgttaatcggaattactgggcgtaaagcgcacgcaggcggtttgttaagtcagatgtgaaatccccgggctcaacctgggaactgcatctgatactggcaagcttgagtctcgtagaggggggtagaattccaggtgtagcggtgaaatgcgtagagatctggaggaataccggtggcgaaggcggccccctggacgaagactgacgctcaggtgcgaaagcgtggggagcaaacaggattagataccctggtagtccacgccgtaaacgatgtcgacttggaggttgtgcccttgaggcgtggcttccggagctaacgcgttaagtcgaccgcctggggagtacggccgcaaggttaaaactcaaatgaattgacgggggcccgcacaagcggtggagcatgtggtttaattcgatgcaacgcgaagaaccttacctggtcttgacatccacagaactttccagagatggattggtgccttcgggaactgtgagacaggtgctgcatggctgtcgtcagctcgtgttgtgaaatgttgggttaagtcccgcaacgagcgcaacccttatcttttgttgccagcggtccggccgggaactcaaaggagactgccagtgataaactggaggaaggtggggatgacgtcaagtcatcatggcccttacgaccagggctacacacgtgctacaatggcgcatacaaagagaagcgacctcgcgagagcaagcggacctcataaagtgcgtcgtagtccggattggagtctgcaactcgactccatgaagtcggaatcgctagtaatcgtggatcagaatgccacggtgaatacgttcccgggccttgtacacaccgcccgtcacaccatgggagtgggttgcaaaagaagtaggtagcttaaccttcgggagggcgcttaccactttgtgattcatgactggggtgaagtcgtaacaaggtaaccgtaggggaacctgcggttggatcacctccttaccttaaagaagcgtactttgcagtgctcacacagattgtctgatgaaaatgagcagtaaaacctctacaggcttgtagctcaggtggttagagcgcacccctgataagggtgaggtcggtggttcaagtccactcaggcctaccaaatttgcacggcaaatttgaagaggttttaactacatgttatggggctatagctcagctgggagagcgcctgctttgcacgcaggaggtctgcggttcgatcccgcatagctccaccatctctgtagtggttaaataaaaaatacttcagagtgtacctgcaaaggttcactgcgaagttttgctctttaaaaatctggatcaagctgaaaattgaaacactgaacaatgaaagttgttcgtgagtctctcaaattttcgcaacacgatgatggatcgcaagaaacatcttcgggttgtgaggttaagcgactaagcgtacacggtggatgccctggcagtcagaggcgatgaaggacgtgctaatctgcgataagcgtcggtaaggtgatatgaaccgttataaccggcgatttccgaatggggaaacccagtgtgtttcgacacactatcattaactgaatccataggttaatgaggcgaaccgggggaactgaaacatctaagtaccccgaggaaaagaaatcaaccgagattcccccagtagcggcgagcgaacggggaggagcccagagcctgaatcagtgtgtgtgttagtggaagcgtctggaaaggcgcgcgatacagggtgacagccccgtacacaaaaatgcacatgctgtgagctcgatgagtagggcgggacacgtggtatcctgtctgaatatggggggaccatcctccaaggctaaatactcctgactgaccgatagtgaaccagtaccgtgagggaaaggcgaaaagaaccccggcgaggggagtgaaaaagaacctgaaaccgtgtacgtacaagcagtgggagcatgcttaggcgtgtgactgcgtaccttttgtataatgggtcagcgacttatattctgtagcaaggttaaccgaataggggagccgaagggaaaccgagtcttaactgggcgttaagttgcagggtatagacccgaaacccggtgatctagccatgggcaggttgaaggttgggtaacactaactggaggaccgaaccgactaatgttgaaaaattagcggatgacttgtggctgggggtgaaaggccaatcaaaccgggagatagctggttctccccgaaagctatttaggtagcgcctcgtgaactcatctccgggggtagagcactgtttcggcaagggggtcatcccgacttaccaacccgatgcaaactgcgaataccggagaatgttatcacgggagacacacggcgggtgctaacgtccgtcgtgaagagggaaacaacccagaccgccagctaaggtcccaaagtcatggttaagtgggaaacgatgtgggaaggcccagacagccaggatgttggcttagaagcagccatcatttaaagaaagcgtaatagctcactggtcgagtcggcctgcgcggaagatgtaacggggctaaaccatgcaccgaagctgcggcagcgacgcttatgcgttgttgggtaggggagcgttctgtaagcctgtgaaggtgtactgtgaggtatgctggaggtatcagaagtgcgaatgctgacataagtaacgataaagcgggtgaaaagcccgctcgccggaagaccaagggttcctgtccaacgttaatcggggcagggtgagtcgacccctaaggcgaggccgaaaggcgtagtcgatgggaaacaggttaatattcctgtacttggtgttactgcgaaggggggacggagaaggctatgttggccgggcgacggttgtcccggtttaagcgtgtaggctggttttccaggcaaatccggaaaatcaaggctgaggcgtgatgacgaggcactacggtgctgaagcaacaaatgccctgcttccaggaaaagcctctaagcatcaggtaacatcaaatcgtaccccaaaccgacacaggtggtcaggtagagaataccaaggcgcttgagagaactcgggtgaaggaactaggcaaaatggtgccgtaacttcgggagaaggcacgctgatatgtaggtgaagcgacttgctcgtggagctgaaatcagtcgaagataccagctggctgcaactgtttattaaaaacacagcactgtgcaaacacgaaagtggacgtatacggtgtgacgcctgcccggtgccggaaggttaattgatggggttagcgcaagcgaagctcttgatcgaagccccggtaaacggcggccgtaactataacggtcctaaggtagcgaaattccttgtcgggtaagttccgacctgcacgaatggcgtaatgatggccaggctgtctccacccgagactcagtgaaattgaactcgctgtgaagatgcagtgtacccgcggcaagacggaaagaccccgtgaacctttactatagcttgacactgaacattgagccttgatgtgtaggataggtgggaggctttgaagtgtggacgccagtctgcatggagccgaccttgaaataccaccctttaatgtttgatgttctaacgttgacccgtaatccgggttgcggacagtgtctggtgggtagtttgactggggcggtctcctcctaaagagtaacggaggagcacgaaggttggctaatcctggtcggacatcaggaggttagtgcaatggcataagccagcttgactgcgagcgtgacggcgcgagcaggtgcgaaagcaggtcatagtgatccggtggttctgaatggaagggccatcgctcaacggataaaaggtactccggggataacaggctgataccgcccaagagttcatatcgacggcggtgtttggcacctcgatgtcggctcatcacatcctggggctgaagtaggtcccaagggtatggctgttcgccatttaaagtggtacgcgagctgggtttagaacgtcgtgagacagttcggtccctatctgccgtgggcgctggagaactgaggggggctgctcctagtacgagaggaccggagtggacgcatcactggtgttcgggttgtcatgccaatggcactgcccggtagctaaatgcggaagagataagtgctgaaagcatctaagcacgaaacttgccccgagatgagttctccctgactccttgagagtcctgaaggaacgttgaagacgacgacgttgataggccgggtgtgtaagcgcagcgatgcgttgagctaaccggtactaatgaaccgtgaggcttaaccttacaacgccgaagctgttttggcggattgagagaagattttcagcctgatacagattaaatcagaacgcagaagcggtctgataaaacagaatttgcctggcggccgtagcgcggtggtcccacctgaccccatgccgaactcagaagtgaaacgccgtagcgccgatggtagtgtggggtctccccatgcgagagtagggaactgccaggcatcaaattaagcagtaagccggtcataaaaccggtggttgtaaaagaattcggtggagcggtagttcagtcggttagaatacctgcctgtcacgcagggggtcgcgggttcgagtcccgtccgttccgccacttattaagaagcctcgagttaacgctcgaggttttttttcgtctgtatatctattattgccagaatcgcaaaaatcctctgcattttacgctctttttcctcaacagtctgaagcccataatcacctcagttaacgaaaatagcattaaaagaggcatattatggctatccctgcatttggtttaggtactttccgtctgaaagacgacgttgttatttcatctgtgataacggcgcttgaacttggttatcgcgcaattgataccgcacaaatctatgataacgaagccgcagtaggtcaggcgattgcagaaagtggcgtgccacgtcatgaactctacatcaccactaaaatctggattgaaaatctcagcaaagacaaattgatcccaagtctgaaagagagcctgcaaaaattgcgtaccgattatgttgatctgacgctaatccactggccgtcaccaaacgatgaagtctctgttgaagagtttatgcaggcgctgctggaagccaaaaaacaagggctgacgcgtgagatcggtatttccaacttcacgatcccgttgatggaaaaagcgattgctgctgttggtgctgaaaacatcgctactaaccagattgaactctctccttatctgcaaaaccgtaaagtggttgcctgggctaaacagcacggcatccatattacttcctatatgacgctggcgtatggtaaggccctgaaagatgaggttattgctcgtatcgcagctaaacacaatgcgactccggcacaagtgattctggcgtgggctatgggggaaggttactcagtaattccttcttctactaaacgtaaaaacctggaaagtaatcttaaggcacaaaatttacagcttgatgccgaagataaaaaagcgatcgccgcactggattgcaacgaccgcctggttagcccggaaggtctggctcctgaatgggattaagcctctctgacagctcctccgggagctgtttttacatgctcgctaaggaaatcgataaaagcccggatgcgcgtacttaccgcacggtcgctgtaatagacggcactgaatggcatttccactggcaacactttatctgccattaactccaccaattctccgcgagcgatttctttgtcgatcatgtagtcggacaaacacgcaatcccgttgccactcaggcaaagctgtttcagtgtttccccactattggatgacaaaccgtacttcacctcatgtaattgtccatcgctacgggctatcggccaggtattgagggaagcgggttcagtgaatcccaggcaaatatgttgctttaaatcgtcgatcgtttctggcttcccgtagcgggaaatataatcgggggaggcgataatttttcgataactgttaaataacggcctggcacgtaagctggaatccgttaacgtaccagcgcgtatcgcgacatccacttttctttcgatcaaattaataatcgtttcggaggagactagcgacaaagtgacttccggatagcgttcacggaaaggcttaattaacggcatcagaaagtgcagcaccactggagttgcggcatcgatccgtaacagtccacgcggtgtattacgcgtctccataatttctgattctgccgctgccatctcctgcaaaattgactgtacgcgacgaaaataacgctcgccttcttccgtcaggctaagttgtcgcgtggtccgattaagcaggctaacgccaagtttcatctccagctttttcaccgcccggcttaccgctgagtttgcttgccctaattgttccgctgcccggctaaagctgccgctttcgacgaccgaaacaaaaatggcgagttcttccgacgtggctttcatttttgctcctgttgcaaaatagaagagatattttgaatttatttgtcattaaaccatcaggatgcgtgatatgtcatgcgatttaatgttctccataatgagcaaaattctgaccggtgtaagcacttgcttacataacaatatacaattgctcgttgaaagagtgagctaaaatccctataacagtagaaccctcccgagtgcggaagggttgacgtaatagaggtttcaaagtcaaaagtgcgaaaaaacacctatgccatgcgctatgttgccggacaacctgcggaaaggatcttaccgccggggtcttttgcgagcatcggccaggcattaccacctggggaaccgttaagtaccgaagagcgtattcggatcctggtgtggaacatatacaaacagcaacgcgctgaatggttgtcggtattaaagaactacggcaaagatgcacatctggtgttattgcaggaagcgcagacaacgccagagttagtacagtttgcgaccgctaactatcttgccgccgatcaggtacccgctttcgtgctgccacaacatccttctggcgtaatgaccctttcggcggcacatccagtgtattgctgcccgttacgtgaacgagaacccattttgcgtctggcgaagtcggcactggtgacggtctatccattacctgacacccgcctgttgatggtggttaatatacacgccgtcaacttcagtctgggcgtggatgtctatagtaagcagttacttcctattggcgatcagatagctcaccacagcggcccggtcattatggcgggagatttcaatgcctggagccgtagaaggatgaacgcgttatatcgctttgcgcgggaaatgtcgctgcgccaggtgcgttttaccgatgatcagcgccgtcgggcgtttggtcgcccgctcgattttgttttctaccgtggtctgaacgtcagtgaagcttctgtactggttacgcgcgcttccgatcacaatccgctactcgttgaattcagtcccggcaagcctgataaataaggtatgtcaggtctgccacagggcagaccaacgtttggcgctgcgcaaaacgtgagcgcggtggtggcgtatgacttatctgcccacatgctggatgtcgtggcacaagctgccgaagcccggcaactgaaaaatatcaccacccgccagggatatgccgaaagtctgccatttgccgataacgcatttgatattgttatcagccgttattctgcccatcactggcatgatgttggtgcagcactgcgagaagtgaataggatattgaaacctggcggtaggctgattgtgatggacgtaatgtctccgggtcacccagtgcgcgacatctggttacagacggtagaagcattacgcgatacctctcacgtacgaaactacgccagcggtgagtggttgacgttaatcaatgaagccaatctgatagttgataatttaattacagataagttaccgctggaattttcttcatgggtcgcgagaatgcgtacgccagaagcgttagtagacgctattcgcatttaccaacagagcgcatcgacagaggtgagaacgtattttgccttgcagaatgatggctttttcaccagtgatatcatcatggtagatgcacataaagcggcataaataaaaaaggcaccgggggaatcggtgcctttttattatctggtttgtcaggaatctggcatgttgttgtttttcacaaacaacgtcagcttatcgcctggttgcagattcgcagtgtcgctgttccagcgcatcacatctttgatgttcacgccgtggcgtttagcaatgcttgaaagcgaatcgcctttgcgcacacgatacgtaatgctatcgctgttgtttgccagtcgctgtgcgctactgcctgcaccaatcgtcaaactttggcctggcttcagcttagatccgcgcagtttgttccactgctgcaaatctttggtgcttacgccgagacgtgaagcgatacttgaaagcgtgtcgccagagcgtacggtgtaaacacggctgttaagcggcgtattgtcggcaaccagcgtcgactgtacagcagcaatttcgcctgaagccagagattcacgcagttgatctgcatgcttctttggcaccatcacgtactgcgggccacttgcgcccagcgtggagccttttacgccagcgttgaatgtcttcagcttgctgacggaaatccccgccatatctgctaccttcgccatttcaaccgggctgctcaggtgcacacgcgccagagcacggctttcatcggtcgttggcagacgtacgccataacgcttgctgtttttgagaatatcactcaatgccagcattttaggcacgtactgcttcgtttcctgcggcaacggtaacgaccagaagtccgtggatttcccacgcgctttgttcgttttaattgccttcatgacccgaccttcgccgctgttataagccgctacggtcagaagccagtcgccgtcaaacattttgttcagacgctgcatcatattcagcgcggcagttgttgaagcaacaacatcgcgacgcgcgtcataattgcgggtctgtttcaaaccataattgcgccccgtgctcggaatgatctgccagatgcctgcggcattggcgccagacgttgcgtgaggatcaaaagcgctctccactatgggtagtagtaccagttccataggcatgttacgttttttaacttgccctgctatccagtacatatacggctctgcccgtaaagttacatcgtggagatagctcttattgcgtaaatatttctgtttctgttcgcgaatccggtcattttccggaattcccatctttagctcgtcgccaatgaaagcccacaagtcaccatctggcgcgatagacgtcccatcgtccatccatcgtgcctgacttgtaaactttgctgcttccccttgaccagctgcagaaaggctctgtgcgtgctgttgaacgttgccggtactctggcaacccacgagcaggacagaggcgagtaatatcgcttttgccttcatgtgtgtgtcaatagttgcttaaaagacgaccgatcataacggcgaacggagccgatgacaagaaagttttatcagaacctatctttctttgaccttaaccatgcaaaacgctcttcaggttgttgcaataatgtttcttcattaattacattaattaaatcaatatcttccgttcttaaaaaaacattaatttgccgctcatttttcagaattacgggtagtgttatttgattttttgcccgtaactccttaactttacgataataatcatttatggacaaatcgtgcggaagaatactcaaagcaaacttcatatttgataaggtatattcatgagcacaacataccaatgtatcgtcaggtaacgcacttaactttttaagtgattgatacatttgtgatgctgtcccttcaaacaaccgaccacacccaccagaaaacagtgtgtcgccgcaaaatagataaggtttactgaagtaacagatatgtcctaaagtgtgacccggcgtagcaattacactaaattcatgccccaaaacgaaggcagtttcgccatctttgactacctgtgttgttcccttatcttgtgtctcttgtggaccatacaccacaatttgtggaaacttttccaccagttcttttacgccgccaacgtgatcgtggtgatggtgggtgagaaatatggcctccggttgccagttattggcggcaatggcgtttaatactggctctgcgtctccgggatcgacaatcaggcagcgacctgcttcatcattcaaaacccagatgtaattgtcatcaaaggcgggaatactgttaagattcatagattacctctcagtgtgaaacggaaggttgtgatgaaaccggcaagagtccctcaaactgtcgtggctcctgattgctggggcgatttgccctggggaaagctttatcgcaaggcgctggagcgccagctcaacccgtggttcactaaaatgtatggttttcatctgcttaagattggcaatttaagcgcagaaatcaattgcgaagcgtgcgcggtttctcatcaagtgaatgtttctgcgcaaggaatgcccgtccaggtacaggcggacccacttcatcttccttttgccgataaatccgttgatgtttgtctactggcacatacattgccgtggtgcaccgatccgcatcgtttattgcgtgaagccgatcgggtattgattgatgatggctggctggtcattagtggcttcaatcccatcagttttatgggattacgcaaacttgtgccggtattgcgcaaaacctcgccctataacagccggatgtttactctgatgcggcagctggactggctctctttgttgaattttgaagtgctacacgccagccgtttccacgttctcccgtggaacaaacacggaggaaaactattgaatgcgcatattcctgcgcttggttgcttacaacttattgttgcccggaaacggactattcctttaacgctaaatccgatgaaacagagtaaaaacaagccacgaattcgccaggcggttggagccacccggcaatgtcgtaaaccacaggcttaaacttcaacttggtagcctgtatcttccagtgtgggattcatcgccgcggcacgagccagttcatcacagcgttcgttttccgggtgtccggcatggcctttaacccattcccatttgatttgatgctgccccaatgcagcatcaagacgttgccagagatcgacattttttactggttttttgtctgcggttttccagccacgttttttccagttatggatccactgggtgataccctggcggacatactggctgtcggtactcaaaatgacttcgcaatgttcttttaacgcctccagcgcgacaatagcggccatcaactccatacggttgttggtggtgcgggtgtagccagcgctaaaggttttctcgcgtccgcgatagcgtaaaatagcgccgtaacccccaggtcctggattgcccagacacgaaccatcggtgaaaatttctacctgtttaagcatctctggtagacttcctgtaattgaatcgaactgtaaaacgacaagtctgacataaatgaccgctatgagcactgcaattacacgccagatcgttctcgataccgaaaccaccggtatgaaccagattggtgcgcactatgaaggccacaagatcattgagattggtgccgttgaagtggtgaaccgtcgcctgacgggcaataacttccatgtttatctcaaacccgatcggctggtggatccggaagcctttggcgtacatggtattgccgatgaatttttgctcgataagcccacgtttgccgaagtagccgatgagttcatggactatattcgcggcgcggagttggtgatccataacgcagcgttcgatatcggctttatggactacgagttttcgttgcttaagcgcgatattccgaagaccaatactttctgtaaggtcaccgatagccttgcggtggcgaggaaaatgtttcccggtaagcgcaacagcctcgatgcgttatgtgctcgctacgaaatagataacagtaaacgaacgctgcacggggcattactcgatgcccagatccttgcggaagtttatctggcgatgaccggtggtcaaacgtcgatggcttttgcgatggaaggagagacacaacagcaacaaggtgaagcaacaattcagcgcattgtacgtcaggcaagtaagttacgcgttgtttttgcgacagatgaagagattgcagctcatgaagcccgtctcgatctggtgcagaagaaaggcggaagttgcctctggcgagcataaatacctgtgaaaggcgctaaaaatagcgacttgggcgatttttgcagcaaacgattcaaaagatgagaaaaaccgttgacgaaggtcgaggcaatccgtaatattcgcctcgttcccaacggaacacaacgcggagcggtagttcagtcggttagaatacctgcctgtcacgcagggggtcgcgggttcgagtcccgtccgttccgccactattcactcatgaaaatgagttcagagagccgcaagatttttaattttgcggtttttttgtatttgaattccaccatttctctgttcaatgattttactctggcgtaggtgcgtgattctcgcttgttgtctcattcattaaaattcaataatgatatcgaaccattcagcttaaatatatttctagagaataaatttatattgattaaatgaatgtatatttcaaattgattttgtttgttattatttaagtgaggtatataattagagtccgttatcaatgctaaatattctaatcattatgacaggcgagggagtgtccaattatgaattcaaaaaagctttgttgcatatgtgtgttattctcgctgcttgcaggatgtgcctctgaatcttctattgatgaaaagaagaaaaaagctcaagtcacacaaagtaatattaataaaaacactccccagcaactgacagacaaagatttattcggtaatgaaaccactctggccgtatccgaagaggatattcaagctgcgcttgatggagatgagttccgcgttccccttaattctcctgtaatacttgttcaatccggcaaccgcgcaccggaaaccattatgcaggaggagatgcgaaaatattatactgtttccacattctctggtatcccggacaggcaaaagcctctgacttgtaacaaaaacaaagataaaaatgagaacgaggatgttgccagtgctgagaatatgaactggatgcaggcactgcgttttgtggctgcaaaaggacatcagaaagcgattattgtttaccaggatatgttgcagacaggaaaatatgactctgcgctgaaatcaacagtatggtccgactataaaaatgacaaactcactgacgctatctccctgcgctacctggtacgtttcacgctggtggatgtggcaacaggtgagtgggctacctggtcgccggtgaattatgaatataaagtgcttccaccattgcccgacaagaatgaagccagtacgactgatatgacagagcagcaaatcatgcaacttaagcaaaagacctataaagcgatggtaaaagatttggttaaccgctatcaataataaattatatctgccgccaggaatttctggcggcaataatacaaaattctttgcataagaaatttttcttgacaaagacagtgcaagaaaggacatggaatccggagttaaaaactgtttgttttagaatatttaattatttaactgctgaatcttccttgcgagaaatatatccattattacatttcatgccatttttaatatagattgctcctgggaaaattcccgtattattaccgcaggggtgataattagtattgacatatcctgtgacaaaaggagctattaaaggtgctattacgatagctattagtaaaaatataagagttagctgtattgttatgtctgtggcgaaattgactaccttcgtttttttgattaagaatgattttattatcgtaagtaaaattacatgaatatttaaaaaggaaaacgacatgaaaccgaagcacagaatcaacattctccaatcataaaatatttccgtggagcattttattattgaatatagaggtttaactccggtaaaaaacaaagaagcattgaatgcagggaaaaataatatggccataaaaaacatcgaaagaaactcttttaatttaacatgtaaacgcatggttaatcctcatatcacgggtggagtgttaagaacatacataaatggagtcatgttttcccttttccatttatcaagttcctgttgccgttttagtccatctctaattgcatattttaatttttctgataaatggcattgagcatcgatttcatttaaaacaactgtacacactatccctgtcagtaaaattgctcctccgacaagaattactggaaagccaaagctaacacaggcaaaagaagccagacttccaatagcggttgcaacaccaccggctataactgctttggccacatccattgaaaaatcgccaagaaaattaaccagatctcgctctgaactcataataaattctatggttctgctgatttaaccgcagagaagttcgccacagcaatccgaaaccactggcacgtggagaataagctgcacaggcgtctggacgtggtaatgaatgaagacgactacaaaataagaagaggaaacgcagcagaattattttcagggatacggcacattgctattaatattttgacgaatgagaaggtattcaaggcagggttaagacgtaagatgcgaaaagcagccatggacagaaactacctggcgtcagtccttgcggggagcgggctttcgtagtaataccccgactctccccgtccttaaacacaacccccactcaccacaacctaaactcatccgcatcctgccatgccggaaacttttctctatattcccgcaatgctgccatcgacagctccgcatcaatgcgcgttgcctgatgcgcgtcggcagtagcgataatctctccttgcggattaatcacccggctgtcaccgcgataatggcagccgttgccatcgctgccgacgcgattgcatcccgccacatacgcctgattctcaatcgcgcgggccgtcagcaatgcctgccagtgcagagagcgcggagcaggccagttggcgacgtacagggcgaggtcataatcgttgagattgcgcgaccacacaggaaaacgtaagtcgtagcacaccagcggcaaaatacgccagccgcgccattccacaatcactcgcgcattgcccgctttataatgtagatgctcatctgccatgcggaacagatgacgcttatcataaaaatgtaccgtgccgcccggctcaaccagcaaaaagcggttaaccgaaccagactccgtttgtaatgcaacactgcctgcaatcagcgcattgcactgctgcgccttagctgtcatccagttcactacgtcatcttgtgctagcgacgaagctgccgcttccatggcaaagccgctggtaaacatctccggtagaacgatcacatcgcgcccggtaataccttccagttgacgatcaaaatgacgcaggttggcaggaccatccatccacaccagtggttgctgcaaaagcgtaatcttcaaaccaggcacggtgtacaactcctttatgcgaagggttttataactttaacaccttatcaggcagttgccttagcgcagaataaattgataacaaatgctgatattggaaatatctgatttgcaaattatcgtgttatcgccaggctttaggaggttaataacatgggcaggataagctcgggaggaatgatgtttaaggcaataacgacagtcgccgctctggtcatcgccaccagtgcaatggcgcaggatgatttaaccattagcagccttgcaaagggcgaaaccaccaaagctgcatttaatcagatggtacaagggcataagctgcctgcctgggtgatgaaaggcggtacttatactcccgcacaaaccgtaacgttgggagatgagacgtatcaggtgatgagcgcgtgcaaaccgcatgactgtggctcgcaacgtatcgctgtgatgtggtccgagaaatctaatcagatgacggggctgttctcgactattgatgagaaaacgtcgcaagagaaactcacctggctgaatgtgaacgatgcgctttcgattgatggtaaaacggtgttgttcgcggcgttgaccggcagcctggaaaaccatccggatggctttaattttaaataattagcggataaagaaacggagcctttcggctccgttattcatttacgcggcttcaactttccgcactttctccggcaactttaccggcttcgtcgccagctcttccggatcaaagtcatcaacgttaatactgcgcagacggctttcttcagctttcaccagaatagcggcttcatctttatcaatcagccccttcaccagcgcgttgtgcgccagttcatccagacgggtaaacggcaggtttttacccagctctttacagatccgctgatgaattgggtcggcggcaatcacatccaccagcgcctcttccagcaagccaaccggattatgctcgctcggcgtcaggtactgaccgcgaccaatgcgggaacgggtggcgttcggcacttgtaaaatcttcgccactttatgatccagcttgtcagaaggtgccagataatgacgtccggtcgggaagatcaccacattcagcagcccggcaaccacgcggttcgggaagttttgcagtaaatcatccatcgcctgttcagcctgatacagcgcatcttgtacgccccagtgcaccagcggcaggtcggcttcattacggccttcgtcgtcataacgcttcagcacggcagaggcgaggtagagctggcttaaaatatcccccagacgggccgagatgcgctcgcgacgtttcaggctgccgcccagcactgccatcgagacatcagaaagcagggcgaggttggcgctcaggcggttcaggtgctgatagtagcgtttagtggcatcgccggttggcgtgctgctggttaaaccgcgcgtcaggcccagccagaagctgcgaactttgttgctaccgacgtgaccgatatgtttgaacaacagtttatcgaacgcgttgacgtcattgttcttcgccgcttccatctcttccagcacgtacggatggcaacgaatcgctccttgtccgaagatcatcatgctgcgggtcagaatgttagccccttcaacggtgatggcaatcggtgcgccctggtaagcacgcgccaggaagttgctttgcccgagcataatgcctttaccgccggtaatatccatcgcatcaataatcgactgctgcccgcggtgggtacagtgatacttaacgatagccgacagcacggcaggtttttcgccgagcataatgccgtaggtaatcagcgatgccgcagcatccatcacgtaggcattaccggcaatacgcgccagcggctcttcaatcccttccatcttaccaatagagattttgaactgacggcgaatgtgagcatacgcgccggttgccagcgctaccgatttcacgccgccggttgagttggaaggcagggtgatgccgcggcctaccgagaggcactccaccagcatccgccagccttgcccggccattttcggcccgccgatgatgtaatcgatcggcacgaagacatctttaccgcgcgtcggtccgttctggaacggtacgttcagcgggaagtggcgacgaccaatttccacgcccggcgtggtggttgggatcagcgcacaggtaatgcctaaatcttctgcaccgccgagtaatttttccgggtcggagagtttaaacgccagcccaagcacggtcgcaatcggtgccagcgtaatgtagcgtttgttccaggtcagacgcatccccagcacctgctggccctgccattcgcccatgcagacaatcccggtgtccggaatcgcgcccgcatcggaacccgcttccgggctggtcagtgcaaagcaggggatctcctgaccacgcgccagacgcggcagatagtgatctttctgctcgtcagtgccgtaatgttgcaacagttcgcccgggcctaatgagtttggcacgccgacggtaatcgccaggatcccgctcacgccggagagtttttgcagcacgcgagactgggcataagccgagaactccagcccgccgtactcttttttgatgatcatcgcgaagaaacgatgctctttaaggtacgcccacaactccggcggcagatccgccagctcatgggtgatctggaaatcattcgccatccggcaggcttcttctaccgggccgtcgagaaacgcttgctcttcggcggtcaggcgcggctgcggatagttatgcagctttttccagtccggcttgccctggaacaagtcgccctcccaccaggtggtgcccgcatcaatcgcttctttctcagtgcgcgacatcggcggcatcaccttacggaaaccgcgaaataccggcgcggaaatcatcgacttacgcataggcgcaaagttaaatggcacgaggataatggccagaggcaccagtacccacgccgaccacagaccagcaacgccgagggcggctgtccaggcgagcaaaatcagactgctgataaataagctcacgcggtgatagaacaacgcgccgagcaggacaaccgtagcgagaatactcaaaatcatcataacgaaaagccccttacttgtaggaggtctgaccacttgtgatgatatggttgtagtggatgtaaaaacatttagcaatatgtttacaatataattacaacaaagctcacattgttgctgtttttatccgcacttcaggtcaaaaagtcctggtcatagcacctgcccgtacttctcgcttttggcggtatccggtacactgcattttgtctattacatttatgctgaaggatatcctcatgtaccaggatcttattcgtaacgaactgaacgaagcggcggaaacgctggctaactttttaaaagatgacgccaatattcacgccattcagcgcgcggcggtcctgttagcagacagctttaaagccggtggcaaagtgctttcctgcggcaacggcggttcccattgcgacgctatgcactttgccgaagagttgaccggtcgctaccgtgaaaaccgtccgggctacccggcgattgctatttctgacgttagtcatatttcctgcgtcggtaatgatttcggtttcaatgatattttctcccgctacgttgaagcggtaggtcgcgaaggcgatgtactgctggggatctccacctccggtaactctgcaaacgtgatcaaagcgatcgcagcggcgcgtgagaagggaatgaaagtgatcaccctgaccggtaaagacggcggcaaaatggctggcacggcggatatcgaaattcgcgtaccgcactttggttatgccgaccgcattcaggagattcacattaaagtgatccatatcctgatccagttgattgaaaaagagatggttaagtaagtctggcgtaggccggataagacgtttacgccgcatccggcatttgtgcgctgatgcctgatgcgacgctgacgcgtcttatcatgcctacaaatctgtacgcgaaccgtaggccgaataatgcgttcacgccgcatccgacctgaaaattcttaaatcaatcttcgccgggggccatgcgctcccgctgttgtggaggttacccatgtgcgaattgctcgggatgagcgccaacgtccctaccgatatctgctttagtttcaccgggcttgtacagcgtggtggtggaaccgggccacataaagatggctggggcattaccttttacgaaggtaaaggctgtcgcacatttaaagatccacaacccagctttaattcccccatcgccaaacttgtccaggactacccgataaaatcctgttcggtggtggctcatattcgcctggctaatcggggcgaggtggcgctggaaaatactcacccatttacccgcgagttatgggggcgtaactggacttatgcccataacggacaactgacgggctacaaatcactggaaaccggcaacttccgcccggtaggcgaaaccgacagcgaaaaagccttctgctggctcctgcataaattaacgcagcgttacccgcgcacaccgggcaacatggcggcggtatttaaatatatcgcctcactggcggatgaactgcggcagaagggcgttttcaacatgctgctttcggacgggcgctatgtaatggcgtattgctcgactaatttacactggatcacccgccgcgcgccgtttggcgtggcaacgttgctggatcaggatgtggaaatcgacttcagctcgcagaccacaccgaatgatgtggtcacggtgattgcaacacagccgctgacgggcaatgaaacctggcaaaagattatgccaggcgaatggcgcttattttgcctcggggagcgtgtagtttgatgccagttgtggctgcacaacttcgtggcttaacggcttgctgaccacgtaacgaccattgaccacagaaacggttggtggcttacgggtttgctcaaagtagtcgtaacccggcttcagttgctcccagaagtccttaaagttggaatatttatggcgcttcatattggcgtcggtcatgcggaacgggtaaatactcacttgcacgctcggctgaccaaacaccagcgcaccagtaacgaactggaatatctcatcaataccctgattggtcattgcgtagcagccgatggaaacacaatcgccgtggatcatcaggtatttcccttcataaccatgcgcacggtcataggcattggggaaaccaatattaatcgctttgtagtaacggctgtctggttttaactgattacgctggacgctataaaacccttccgggcttttgaaatcgccctgacgctgttttggccctaagccgccggaatatttacagattttatagctgtcgagcagttgatattgctcgcccattttgacgtagagatcgagcgtacgttcttccttgaagatctggatgtagacaggggatcccatcaactgctgcttatactctttgctcacaggcgtggtagagctactgctgcccagcaaaccggcaaatgaaacgcacgggatcaacaacatcgcaagaattaatgcgattttacgcatactgcttattccttgataaaacggttacacacgccaggacggcaaaatggatcccaaatcggaatagtctggatttggaaggctcacattatcaccaaaagagttttacgcaagcctgtcggcgcagggtttacaaatttcatcggaagcgggctttacccaaagagcgccgcgtgagttccagttctctcaaatcgtaaaagtttatcggtaagtttgtaaatcaggatccagtccggttcgacatgagcatcgcgataacctttccatgaaccttgcagcgggtggtctttataaacagctggaagcggtaaagtattattgataagaagcgtcataagatatttcaatttattcatatccttatgacgcttttgtgcaagttttacatcctttgaatattgtcccgagtattcaatatccctttgaatcatatttaaattcctaatttatcaaataaatcatcggcgtctttggccttatgaacatcaatgccagcttcgctgtttttgattgattgaatggttaattgattaggctcgcgtaaatcaaacggcaatgccttttcacgcgcgacctttgtgagggttatgcgaaccaggtcagagatggtcagccccatcccggccagtacgtccgctgcctgattcttcagatcttcatcgattcgggcgcgaacaaacgcgttagcagccattggggtatctcctgtgctgtatatttattcagcttgaattgtagctcaaatgagcaacagcgacaatccatgagtaatttaataaacggatgtttttacataattaactgaaatatatatgttaattttataataatggtttattaagtttgttcagaaacgatccgggatacactgcaacattaaagcatgaccagccattattgagtatgtccttgccgtcgattccatcctttgtattgtctggattactgttgatttgtttgccgttttcttcatttgccagcgccaccacatcacatatctctttcagctacgccgcccgccagcggatgcaaaaccgtgcgcgtttattaaaacagtaccaaactcatctgaaaaagcaggccagctatattgtggaaggcaatgccgaaagcaaaagggcgctacgccagcacaaccgggagcagataaaacagcatccagaatggtttcctgctccgctcaaggcgagtgacagacgctggcaggcgctggcggaaaacaaccactttttaagcagcgaccatctgcataacattaccgaagtggcgattcaccgcctggagcagcagcttggcaagccttacgtctggggcggtacgcggcctgataaaggctttgactgtagcgggttggttttttatgcctacaacaagatccttgaggctaagctcccgcgcacggccaatgagatgtaccactatcgccgggcaacgattgtggcgaacaacgacctgcgccggggagatttgctgtttttccatatccacagccgcgagatagccgatcatatgggcgtgtatttgggcgatgggcaatttatcgagtcgccacgtaccggcgaaaccattcggataagccgattagccgaacctttctggcaggaccattttttgggcgcgcgcaggattttgacggaagagacgattttgtaggacggataaggcgtttacgccgcatccggcagttgtacgcaggtgcctgatgcgacgctggcgcgtcttatcatgcctacgagcccgcgaatatttgcgagccgctttcccgatataaaacaacctcattgccaacctttccttttcttcttaccgttgagaaaaaggagtcgccatgtctgaatatcgtcgttattacatcaaggggggaacatggtttttcacggtgaatttacgaaatcgtcgaagccaacttttgaccacccagtaccagatgctccgtcacgccattattaaagttaagcgagacaggccttttgaaatcaacgcctgggtcgttttgccagagcatatgcactgtatctggacattacctgaaggcgatgatgatttttcctcgcgctggcgggaaattaaaaagcaatttacccatgcttgtggattgaaaaatatctggcaaccacgtttttgggagcacgccatccgcaataccaaagattataggcatcatgttgattatatttatataaatccagtaaagcatggttgggtaaagcaagtgagtgattggccattctcaacgttccatcgcgatgtcgcgcgagggttatatcccatcgattgggcgggggacgtaacggattttagtgccggggagcgtatcatttcataattgtgcgcagatgcctgatgcgacgctagcgcgtcttatcatgcctacaaacttgtgccggatcggtaggccggataaggcgtttatgccgcatccggcagttatgcgcagatgcctgatgcgacgctggcgcgtcttatcatgcctacaaacttgtgcctgaacggtaggacggataaggcgttcacgccgcatccggcagttgtgcaccaatgctggatacttacatcaacgcccccataatcttcaactccagctcatccggcacttcgttatacgacagcacatgcagccccggcgcaaacaaccttgcataacgcgccagcaaagggcgcagctgcggtggcaccagcagcaccgggtctttccccgccgctttcatctgctctttcacctgtggcatcgtactctggaactggttgagcatattcggatcgaccggcacgctgtcgagcatcactttcccgccctgttgcgcctgattcaccacgttggtcagcagattttccagctcattattcagcgtatacaccgtcagctcctgcttgcgaacgaacggatgggtaatgctgcgccgcaatgccaggcgcacatcggccgccagcagaatatgatctttcgtcaccgtgctactggcgaccagcacggtggcgatggtgacgatatcgcgcagggaaacgccttcggtcagcagcgcccggtacactttcagcaactggctgtaattgagcgccgcgctcaaatcttccgccagacgcggtgccgtcgacgataaacggttatgcaactgcgtaatatcatcatagttaaacaaatcaggaatatagctgcgcacaatcttatttacatgggtagcgatcacgctggcgctgtcgatcacctgataccccatattcagcgccttcgctttctgcgccgcctggatccaggtgaccggcatcccgtacgccgggtcgttcccctgcacgccgtcaatctcgccgtaggtttcgctggagggcagggccatcagtttatccgccggaatatccgcttcatcagcctttatgccgttgatgaaaatggcgtactgactgggcttaaggcggaagttttcccgaatgcggatctccggcagcagcacgccgttgccgtcagaaatcacctgccgcacgccgcgaatccgctgggtgagcgggttaccctgtgctttgtccaccagcgccaccagtttgtaaccgaggcttaaactgataggctcgatcagcggaatggtttcccaactgacctgctgctcgctggtttcggtgatggtgcgggtcagcgtttcgaggcttttctcttccgcctccgccgccagcggctgtttgctcatccgccagccggtaaaaccaagcagggcgctgaacagcaaaaacggcaggtgcggcattcccggtaccaccgccagcacgaacataatcccggtggcggtgtagagcaccgacgggcttgccagcagctggttacgcacgtcatgggcgatatcgccgttgtcgctgacgcgggtgacgataatcgccgccgcggtggagagcagcagggaagggatctgcgccaccaggccgtcgccgatggtcatcagcacatactgctggaaggcagcatcggcgctcaggttgtatttgaagatcccgatacagacgccgccgatcaggttgatcgccagaatcatcatcccggcgatggcgtccccgcgcacaaacttcgatgccccgtccatcgcgccgtagaaatcggcctcgctggcaacatctttacgccgggtttgcgcctgcgcctggttgatcaatccggcgttaagatcggcgtcaatcgccatctgtttgccgggcatcgcgtctaaggtaaagcgggcagaaacctcggaaatacgctcggcccctttggtgacgacaataaagttgattgtcaacagcgtcagtaaatccgagcgtgaaagcattatcgccgcgctgcacgggcagtcgatttttaacggtggtgggctgtcgccgttaaataaaatcagcccgtctcatccgccaaaacctgccaccgtggcggtgccggaagagacggagaaaaaagcgcgtgatgtgaatgagaaaacggcgctgctgaagaagaaatccgccaccgagcttggtgagctggcaaccagtatcaacaccattgcccgtgatgcgcatatggaagcgaatctggagatggagattgttccccagggattacgcgtgctgattaaagacgaccagaaccgcaatatgtttgaacgcggcagcgcgaagattatgccgttctttaaaacgctgctggtggagctcgcgccagtgttcgactcgctcgataataaaattattattaccgggcataccgatgcgatggcctacaaaaacaatatctacaacaactggaacctttcgggtgaccgcgcgctttcggctcgtcgggtgctggaagaggccggaatgccggaagataaagtgatgcaggtaagcgcaatggcggaccagatgctgctggattccaaaaatccgcaaagcgcgggcaaccggcgcattgagattatggtgctgaccaaaagtgcgtccgatacgctgtatcaatactttggtcagcatggggataaagtggtgcagccgctggtgcaaaagctggataagcagcaggtgctttcgcagcgaacgcgttaaatgctgaatctttacgcatttctcaaaccctgaaatcactgtatactttaccagtgttgagaggtgagcaatgcgtaaaatcattcatgtggatatggactgctttttcgccgcagtggagatgcgcgacaatcccgccctgcgcgatatccctattgctattggcggcagccgcgaacgtcggggggtgatcagcaccgccaattatcccgcgcgtaaatttggcgtacgtagcgctatgccgacagggatggcgctcaaattatgcccacatctcaccttgcttccggggcgctttgacgcctacaaagaagcctcaaatcatatccgtgaaatcttctcgcgctacacctcgcgcattgaaccgttgtcactggatgaggcttatctcgatgtcaccgatagcgtccattgccacggttctgcgaccctcatcgcccaggaaatccgccagacaatcttcaacgagctgcaactgacggcgtctgcgggcgtggcaccagtaaagtttctcgccaaaatcgcctccgacatgaataaacccaacggccagtttgtgattacgccggcagaagttccggcatttttacaaaccttaccgctggcaaaaatccccggcgtcggcaaagtctcagcggcaaaactggaagcgatggggctgcggacctgcggtgatgtacaaaagtgtgatctggtgatgctgcttaaacgctttggcaaatttggccgcattttgtgggagcgtagtcaggggattgacgaacgcgatgttaacagcgaacggttgcgaaaatccgtcggcgtggaacgcacgatggcggaagatattcatcactggtctgaatgtgaagcgattatcgagcggctgtatccggaacttgaacgccgtctggcaaaggtaaaacctgatttactgattgctcgccagggggtgaaattaaagttcgacgattttcagcaaaccacccaggagcacgtctggccgcggctgaataaagctgatctaatcgccaccgcgcgtaaaacctgggatgaacgccgcggcgggcgcggtgtgcgtctggtggggctgcatgtgacgttgcttgacccgcaaatggaaagacaactggtgctgggattatgatgtatactattatgtatattctggtgtgcattattatgagggtatcactgtatgcatcgaattctcgctgaaaaatcggtcaatatcactgagttacgtaaaaacccagctaaatactttattgatcaaccggttgcggttctttctaataatcgccccgcaggatatctcttaagtgccagcgcattcgaagcgttaatggacatgcttgctgaacaagaggagaaaaagcccataaaggcgcgcttccgtccaagtgctgcaagattagaggaaattacacgccgcgctgaacaatatcttaatgatatgacggatgatgatttcaatgactttaaggaataaggatgcgggtattcaaaacaaaacttattcgcctgcaacttacagcagaggaacttgatgcgttaacggcggattttatttcctataagcgtgacggtgttttgccagatatatttggtcgcgatgcactctacgacgactcctttacctggccattaatcaaatttgagcgagttgctcatattcatctggcaaatgagaataatccatttccgccacagttgcgccaattcagcagaacgaatgacgaagcgcatttggtatattgtcagggggcgtttgatgagcaagcatggttgctcattgccattctgaaacctgaacctcataaactggctcgagataacaaccaaatgcataaaattgggaaaatggcagaagcgtttcgcatgcgtttttgaatttatattatgaataacatacaaataagaaactatcagcctggcgattttcagcaactatgcgctattttcattagagcggttacgatgaccgccagtcagcattattcaccacaacaaatttccgcctgggcgcagattgacgaatctcgctggaaggagaaactcgcgaaatcacaagtgtgggttgcgatcattaatgcacaaccggttggttttatttcccgcattgaacattatatcgatatgttatttgttgaccctgaatacacccgccgtggggttgccagcgctttgttaaaacctttgattaagtctgaatccgaacttacggtggacgcaagcataaccgcaaaacccttttttgaacgttatggttttcagacagttaagcagcagcgcgttgaatgccggggagcgtggtttactaatttttatatgcgatataaaccgcaacattaaatccagcttgcaatgaaaataacgcccgcctggtatgtgcgcgttttctgattccacaaactgcaaggaggtaaatcatgacaaatcctttatcaatgactctttgcagacctttccaggattaattctttttttcttgccctggattcgtctgccatttcctgatttttatatttatatactctaaataattcgagttgcaggaaggcgacaagcgagtgaatcgccaggagcttacataagtaagtgactggggtgaacgaacgcagtcgcagtacatgcaacttgaagtatgacgagtataaatggaatggtacatgggcaaatatattcgtcccttatccgatgcggtatttaccatcgcatctgatgacctgtggatcgagagtttagcgatccaacaattacacaccacggcaaatttacccaacatgcagcgcgtagtggggatgccagatttacaccccggacgcggctacccgattggcgcagcgttcttctctgttggtcgtttttacccggcaagacgtcgcggtaacggtgctggaaacagaaacgggccgctactctgacacactgcgttcggcgctggtttctctcgatggcgataacgcatgggcattaagcgaaagctggtgtggcactattcagtggatttgtccgagtccgtatcggcctcatcatgggcgcaaaaactggtttctgggcattgggcgttttaccgctgatgagcaggaacaatcggatgcaatccgttatgagacgctgcgttcgtcggggccgggcggtcaacatgtcaataaaaccgactcggcggtacgcgccacgcatttggcatccggtattagcgtgaaggttcagtcagagcgtagtcagcatgctaacaagcggctggcacgattgctgattgcctggaagctggagcaacagcaacaggaaaatagcgcggcgctgaaatcgcagcggcgaatgttccatcaccagattgaacgtggcaacccgcgacggacatttacagggatggcttttatcgaaggataatgaaggatgaaactgccggaaggcgattaaacgccatccggcagcaaatcaaataattacttcgccggaatttctttcagcagttcagtcagcagtgtccagtaatgacctacgctttcgatgtgaacttgctcatccggagagtgtggaccggtgatagttggcccgatagaaaccatgtccatttccggatacggttttttgaacagaccacattccaggcccgcgtggataatctggatgttcggcgtcttgttgaacaggcgctgataggtttcacgtaccagatgcatcaccggagaattagcgtccggctgccagccaggatatgcgcctttcgcttcggttttcgcgccagccagtttacccagcgaatccagcatgctcaccacgtagtctttaccgctgtcgatcagtgaacggatcaggcagtgaatttctacgttattgtcagtcatggtcaccacaccgacgttcagggaggtttcaaccacacctttggctacatcggagttacgaatcacaccgttcggggtggcgttcagcagacgaataaaggtatcgcgagatttcgcaatcagggcagctttatcgttcgctacagagtccagcaacaaggccagatttttctctttttctgccagctcgtttttcaggatctcctgataggtattcaccagagatttcaggacgtcgactttatcagctgcgacagcaatggtcgcaaaggcttcacgcgggatggcgttacgcagtgtgccgccgttgaaatcgataaggcgcagatccagttcttccgcatgacccgccaggaagcgcaccagcagtttgttggcattacccagcccaacgtggatttccccgccggagtgaccgcctttcagaccttttaaggttaacttgaaggtttcaaaaccagctggaaccgcttcacgatctaaatgcaggttggaggtgaagtcgataccccccgcacaacccatgtagatttcaccttcttcttcggagtcggtgttaatcagaatatcagcctgcaaccagttgccctgtaagccgaacgcaccgtccataccggcttcttcggtcatggtcagcagcacttccagcgggccgtgaaccacgttttcgtcagccagaaccgccagcgcagaggccataccaatgccgttatccgcacccagcgtggtgccgcgcgctttaacccattcgccatcaatataaggctggataggatctttcgtgaagtcatgcacggtgtcgttatttttctgcggcaccatatcgaggtgggcctgtaagacgaccggtttacgattttccatacctgcggtagcaggtttacgaatcaggatattacctacctgatcgcgttcgacatggaaacctttctcttttgcccaaccaacaatgtattcagcgagttgctcttcatgataggacgggtgaggaatagaacagattttggcaaaaatatcccacagcggctgtggagataattgagacagttcagacacgttaagtctccttgtcgatcacccgcaaaacagtattgcaggtcacagggttagcagaaaatgttgtcaacacaagacaggcttgcgagatatgtttgagaataccactttatcccgcgtcagggagaggcagtgcgtaaaaagacgcggactcatgtgaaatactggtttttagtgcgccagatctctataatctcgcgcaacctattttcccctcgaacactttttaagccgtagataaacaggctgggacacttcacatgagcgaaaaatacatcgtcacctgggacatgttgcagatccatgcacgtaaactcgcaagccgactgatgccttctgaacaatggaaaggcattattgccgtaagccgtggcggtctggtaccgggtgcgttactggcgcgtgaactgggtattcgtcatgtcgataccgtttgtatttccagctacgatcacgacaaccagcgcgagcttaaagtgctgaaacgcgcagaaggcgatggcgaaggcttcatcgttattgatgacctggtggataccggtggtactgcggttgcgattcgtgaaatgtatccaaaagcgcactttgtcaccatcttcgcaaaaccggctggtcgtccgctggttgatgactatgttgttgatatcccgcaagatacctggattgaacagccgtgggatatgggcgtcgtattcgtcccgccaatctccggtcgctaatcttttcaacgcctggcactgccgggcgttgttctttttaacttcaggcgggttacaatagtttccagtaagtattctggaggctgcatccatgacacaggcaaacctgagcgaaaccctgttcaaaccccgctttaaacatcctgaaacctcgacgctagtccgccgctttaatcacggcgcacaaccgcctgtgcagtcggcccttgatggtaaaaccatccctcactggtatcgcatgattaaccgtctgatgtggatctggcgcggcattgacccacgcgaaatcctcgacgtccaggcacgtattgtgatgagcgatgccgaacgtaccgacgatgatttatacgatacggtgattggctaccgtggcggcaactggatttatgagtgggccacccaggcgatggtgtggcaacaaaaagcctgtgcggaagacgatccgcaactcagtggtcgtcactggctgcatgcggctacgttgtacaacattgccgcctatcctcatctgaaaggagatgacctggccgagcaagcgcaggctttgtcaaaccgcgcctatgaagaggccgctcagcgtctaccgggcacgatgcggcagatggagtttaccgtacccggcggtgcgcccatcaccggctttttgcatatgccgaaaggcgatggcccgttcccgacggtattaatgtgtggtggtctggatgcgatgcagacggactattacagcctgtatgaacgttattttgcgccgcgcggcattgcgatgctgactattgatatgccgtcggtgggcttttcttcaaaatggaagctcacccaggactccagcctgttgcatcagcacgtcttaaaggcgctgcctaacgtaccgtgggtggatcacactcgcgtcgcggcctttggtttccgtttcggcgctaacgttgccgtgcgtctggcataccttgaatcgccgcgtctgaaagcggttgcctgtcttggtccggtagttcataccctgttgagtgattttaagtgccagcaacaggtgccggaaatgtatcttgacgttctggccagtcgtttggggatgcatgatgcttccgatgaagcgttgcgcgtggagctgaatcgctattcattaaaagtgcaaggattgctgggacgtcgctgcccaacgccaatgttatcaggctactggaagaacgatccgttcagcccggaagaggactcacgcttaatcacctcatcatctgctgacggtaaattattagagatcccatttaacccggtgtatcggaattttgacaaaggtcttcaggaaatcaccgactggatcgaaaaacgcttgtgttaaaaatttgctaaattttgccaatttggtaaaacagttgcatcacaacaggagatagcaatgacgttaccgagtggacacccgaagagcagattgatcaaaaaatttaccgcactaggcccgtatattcgtgaaggtaagtgcaaagataatcgattctttttcgattgtctggctgtatgcgtcaacgtgaaaccggcaccggaagtgcgtgaattctggggctggtggatggagctggaagcgcaggaatcccgttttacctacagttaccagtttggtctgttcgataaagcaggcgactggaagagtgttccggtaaaagacactgaagtggttgaacgactggagcacaccctgcgtgagtttcacgagaagctgcgtgaactgctgacgacgctgaatctgaagctggaaccggcggatgattttcgtgacgagccggtgaagttaacggcgtgagtgaaatgtgccggatgcatcacatccggcaatattcattaaaactgatacgtcatgccaaccgcgacaatatcatcattattaatattcaatttgttatcgctatccagttggttgattttataatcaacaaacgctgacatatttttgttgaaataatacgtagcaccgacgtcgatataattgaccagatcttcatcaccgataccttcaatatctttccctttcgataagacataacccagcgatggacgcagaccaaagtcaaactggtattgagcgaccgcttcaaagttctgtgtcttattggcaaagccgccagttattggcgtcattttgcgtgtttcagaatagaaagttgccagataaatattattggcatcgtatttcagacctgttgcccatgcttctgcacgcttgcctgtgccacggctttgcaggttctgctcgttggtgcgatctgagttggtataggccccactaatggcgaaatcgctgccgccaaagtcatatgtcaatgacgtgccgaagccatcgccgttttgctttttaacgtcgcggttttcgtttttcccttgatattgcagggttaagttcaggccatcgataacgccgaagaagtcggtgttccgatacgtcgccagaccgctggcgcgtttggtcataaagttgtcggtctgcgccgaggaatcgccaccaaattccgggaacatatcggtccaggcttccacgtcatacaacgcccccaggttacgaccataatcgaaagaacccaaatctttatatttcaacccggcaaaagcgagacgcgttttttgctgtgcagtatcactctctgctttattaccggcaaactctgcttcccaacgaccataaccagtcagttgatcgttaatttgtgtttcgcctttgaaaccaaaacggatataactctggtcgccatctttactggcgttatcactcatataatgcatggctttaactttgccatagacatccagtttattaccgtctttattatatatttctgcagcctgtacagatgcagatgccacaatgcccatcaccactaatgccagagtgctctttttcattttcattcctgattttaattaacgcgcgaatattcagcgggagagtcccgttgaaaacaggaaagtttttaacctgagattgttaaagatatattacagattaataatattcttaaaatgtggtaatttattaaatctgtaataaaagcgtaaacaactgccgctaggcttgctgatcccgcgcaacaaaacgccatgctttgctcgcagatggttggcaaccgacgacagtcctgctaaaacgttcgtttgatatcatttttcctaaaattgaatggcagagaatcatgagtgacagccagacgctggtggtaaaactcggcaccagtgtgctaacaggcggatcgcgccgtctgaaccgtgcccatatcgttgaacttgttcgccagtgcgcgcagttacatgccgccgggcatcggattgttattgtgacgtcgggcgcgatcgccgccggacgtgagcacctgggttacccggaactgccagcgaccatcgcctcgaaacaactgctggcggcggtagggcagagtcgactgattcaactgtgggaacagctgttttcgatttatggcattcacgtcgggcaaatgctgctgacccgtgctgatatggaagaccgtgaacgcttcctgaacgcccgcgacaccctgcgagcgttgctcgataacaatatcgttccggtaatcaatgagaacgatgctgtcgctacggcagagattaaggtcggcgataacgataacctttctgcgctggcggcgattcttgcgggtgccgataaactgttgctgctgaccgatcaaaaaggtttgtataccgctgacccgcgcagcaatccgcaggcagaactgattaaagatgtttacggcattgatgacgcactgcgcgcgattgccggtgacagcgtttcaggcctcggaactggcggcatgagtaccaaattgcaggccgctgacgtggcttgccgtgcgggtatcgacaccattattgccgcgggcagcaagccgggcgttattggtgatgtgatggaaggcatttccgtcggtacgctgttccatgcccaggcgactccgcttgaaaaccgtaaacgctggattttcggtgcgccgccggcgggtgaaatcacggtagatgaaggggcaactgccgccattctggaacgcggcagctccctgttgccgaaaggcattaaaagcgtgactggcaatttctcgcgtggtgaagtcatccgcatttgcaacctcgaaggccgcgatatcgcccacggcgtcagtcgttacaacagcgatgcattacgccgtattgccggacaccactcgcaagaaattgatgcaatactgggatatgaatacggcccggttgccgttcaccgtgatgacatgattacccgttaaggagcaggctgatgctggaacaaatgggcattgccgcgaagcaagcctcgtataaattagcgcaactctccagccgcgaaaaaaatcgcgtgctggaaaaaatcgccgatgaactggaagcacaaagcgaaatcatcctcaacgctaacgcccaggatgttgctgacgcgcgagccaatggccttagcgaagcgatgcttgaccgtctggcactgacgcccgcacggctgaaaggcattgccgacgatgtacgtcaggtgtgcaacctcgccgatccggtggggcaggtaatcgatggcggcgtactggacagcggcctgcgtcttgagcgtcgtcgcgtaccgctgggggttattggcgtgatttatgaagcgcgcccgaacgtgacggttgatgtcgcttcgctgtgcctgaaaaccggtaatgcggtgatcctgcgcggtggcaaagaaacgtgtcgcactaacgctgcaacggtggcggtgattcaggacgccctgaaatcctgcggcttaccggcgggtgccgtgcaggcgattgataatcctgaccgtgcgctggtcagtgaaatgctgcgtatggataaatacatcgacatgctgatcccgcgtggtggcgctggtttgcataaactgtgccgtgaacagtcgacaatcccggtgatcacaggtggtataggcgtatgccatatttacgttgatgaaagtgtagagatcgctgaagcattaaaagtgatcgtcaacgcgaaaactcagcgtccgagcacatgtaatacggttgaaacgttgctggtgaataaaaacatcgccgatagcttcctgcccgcattaagcaaacaaatggcggaaagcggcgtgacattacacgcagatgcagctgcactggcgcagttgcaggcaggccctgcgaaggtggttgctgttaaagccgaagagtatgacgatgagtttctgtcattagatttgaacgtcaaaatcgtcagcgatcttgacgatgccatcgcccatattcgtgaacacggcacacaacactccgatgcgatcctgacccgcgatatgcgcaacgcccagcgttttgttaacgaagtggattcgtccgctgtttacgttaacgcctctacgcgttttaccgacggcggccagtttggtctgggtgcggaagtggcggtaagcacacaaaaactccacgcgcgtggcccaatggggctggaagcactgaccacttacaagtggatcggcattggtgattacaccattcgtgcgtaaataaaaccgggtgatgcaaaagtagccatttgattcacaaggccattgacgcatcgcccggttagttttaaccttgtccaccgtgattcacgttcgtgaacatgtcctttcagggccgatatagctcagttggtagagcagcgcattcgtaatgcgaaggtcgtaggttcgactcctattatcggcaccattaaaatcaaattgttacgtaagatcttatcattctcccaccaaaaaattatcttaatgtaacagctggtgtaagtaaattctatcaacgaagatcaatcttatctactgaccaaaaaggcctgatagggcttcgctcactatacatccttggctgcaggtttagttgtacaccactcctaaatttaatgtgttggcaatgtgttcaataaagctcgaacaaattagctcattatgatcggttaatacttcaacttctggttgcatgattgtttgtccgtaaaaagataacgcgcctgccgggtagtagcaggcgcattacgcaataggtaaacaagggaggaagttcagaaatgtaaatcgggaaggttgtacgcaatgttcatcgtactacgttgttacggctttgccgcaacaagccagttgcctgccgcgctcgcagaatgtctgcagcccggagataaggagattgttcctgccagctaaatcccttcctgtcgatacgaaccagctcgtatttttctaccagaaaattcacggcatcggctagggtgataccggcatcgatgtgttccttaatcacagcctcattgcagaatggcgtgtcgtttattgtcagaccatagtgctgttccagcagacgtgtcagtaacatttgccagacagccacgggtgacaggcagggcttcaccgcccgctgagttattgcaggtaaagttttcatgtttgctctcgtgtaggtaattaacgctgagtggggtaaatggcgatgtatacgtagccgcaactgccaagggtgtcggcttcgcaggttaaatcgttgtggtacagggtaacgcagtgggcatggtgggggctgagttcaccggtggtcagcatcgattccatctggaggataaagtgcgggaatgtttcatccagcttccggcattcgatgtcactgaacttgccggtgatgctggcccggtcagccagataatgcagtcggttgccttcctgcaccagacgggctcccaggcgcagtgtaatctcccgctgcaggcccctggtagggttgctcattacagttctccactattgtcagttcagggtgatgctcatcaggcaggtatagggcccattgcggtcctggcggcgttcggcgtataccgcgaggactccggcgatatccggaacgtccctgccggtgtaatgacagacgctaccgtgccactggtatttgccggtgcagtagcgaaagattcgggactcaggatgctggcggtatatcgtcattgccctgcgtttactgataattttcatgtaatacctcaaagcagaccgtgttctgcgaacgaatagatttgcctgccaccgacaatcagatggtcagggacacggatatccaccagctgaagcacctgaaccagtcgctgcgtgagggttttgtcggcctggctaggtgtcgtctcgccggaaggatggttatgcgcgagtatcaccgccgccgcgttgaagtgcagagcacgtttgaccacctcccggggatgcacctcggtgcggttaatcgtgccggtgaagagcgtttcatgggcaatcaactgattctggttgtccagatacaacacccggaactcttcccgctcaagcgcggccatatgcagtcgcagccattcacgtacggcgtgggtagaggtgaaggctacgccgggctcatgcaggtggcggtccagagccctgagcgcccgctgaatgagacgccggtcctgtggcgtcatctcgccgggtaaaaaggaaagctgtttcatctgttgctccttcggtcagtcgataatacgcagaatggcgtgagcctctggatgttgcatggcatactcccgcaggcggtaatagtgtgcggtcatcgcgtcacattctgtacggcaggcatggtggctatacgcaatcaggcagacagcaatacctgctgcttctgcactcatttgggcatcgttaccgttcaggcagttaaacagacgccatgtctcatcgttgtcaggctcgggggacataaatgcgccgccattgctgagggtgtagaacgaccagataccaccgctgtagccctcacagaagcggtccatccaggcgaagatatgcggctccaggagtagccactgcgggatagcgccaaagtactgtggccagaaatcgatacgctgttcatcggggaccggcgtgacggtcagttcaaattcgggttggttagcgggtgcgaggtcgtgctgcgtctgtgttgtcatgggtatgtctccgtcaataaaaacgccagcggcgatggctggcgtatggggatataaagtgtgttcggggaggtgaatgcgggtaaatgcttcgcgatcagcgggtggccgtgtctgtacggatgcctgaggtgcggatatagcggttaagaccttcaccggcatccggctcaaagttccatgcccgccagaccatccggccttcagtatcacgaaccaccagacggaagtgactgccctggtcgtcttcgagtgtgatattgctgtacgtggtagtgaccgcttgcgcttgtctccgggtgaaaggccccggtggcagcaacacggattgggtcattttcgggctcctgataaaagaaaaccccggcagcctgctagctgtcggggtgaatttgctggggaagatactactatcagtcgttgctgcagtctccgagagtggacagaactttctcagcgttcttccggtccgcagtgaaggtccctgctttgtggtcattgacgtagacgtcgaactgcccggcctcagagatattgctgatgaagtcaaaccaggcgttatcgccgttacgccagcccaggctggacggaataatgtactgctggtgatccatcactacggtgatagtagtgtcgtcatcgtgcgaactgaccatcttgtcatcggcaagggtaagaaagactgaatgctgatagaaaccattctggtccgggttccctgtgcagttgatggtaaacgtctttccgctggcttcggtcacgctgtattccgtattgccctgaccgtaaccctgctgccagaaccccgggatagcagaggcattaaagctcgcgagcagtacacccgccagcataaaccgacttagtgaaagtattgtcattcttgtctcctttgtcgttgttttattcctgattgtcagggttcgagggtatcagtagctgccccatcagtttgccgtcatgggcgtactcaaagtatttttctttggtatacgggtccgtcacctcctggtattccagtttgatgttatcggcaatacacagcgcattcatcagtggctggacggttttttcctgcatatccacgaggtagtagtaactgccatcctcgcagccatcgggcgactggcgggtacgtaaaacctgcaaggtgggaccggataagtagtcaacctgtgaccattcttcgctgacatcatcctggtggctgaccacatcactgaaacgcggtggggtgaggtccttaaatttactgatggccttcaggtcatcacttctgtcatcgcatgcgatgagaaacagagtggtggcaaccagcgccagcagaggcagtgttttacgtttcattatttttttcctgaaatcagacgaaccactttggcaaagacataaatgcccacgaaaatacccaccggcacgccgacgaacggtgtcagcgcgacactggcagcaccggctgcgccacctcccgtcagcagtgcggcaacagtggcaagggtcagggccgcgagactgtcggacaccccggttttgttcagaatgatgacgatgacaacaatggcgataatggcaatatccggactgatactccaggtccagatacatcagccgctcacgaaaatcacgccgcagcgtgcgcaccgacacaccaaactcagcggcaagcttacgcacactcagcgtttcccctgccaccagacggctgattatcagtgacagcctgacagccagccggtcatggcggcgttctgcctgtgtcatgagacgttctccgtgaaagttaactgactgaaaatgatgtgattactttaaagagggggtcggacagggtatggacaccacagaaactatttttcatttctgcaaaagccagaggcagcgggggttacaggccttccctcggtgagtgaggaccgtcagcacggtgcgatgcggacaggtggtgtccgatattaacaaagcagcaacattaaacggtcactgcagttgcgtgagcagggcttccgccatcacccacagtgcccggttaagtttcacgtccccgtcgataccgcgaacggcacgggtatgtgaccgtcctcctttggcattacggccactgagcccgcccttaatcaggttctcctgaatacgctggtacgtggtccacaggtcattgctctcatcctgccagcggcgaggggagaggatctgcgattcagtcaccggctggtggtcttcaccaaagcggtatgtgagggcggcttttgccagtgcctgctgtgccgggggtggcaacagcaacgactgcatggcatcccgtttctcctccacccggtcaaaaatccccagcacctcatacgcgccttcaatcacctgactcaccacgtcccccttgtgtggcacccgcacctcgccaaacgactcaccgcagacgagcccgttctgacaaaccgcacgaaatagtcccggcaacatctgatacgaactggttccatcgtgagagttgagtagaataatttccggcacctgtttaccggtgatctgcccttcccgccgcagacgcagcatatgctttgtatgttcacgacgacccgggtcacgcacgcgggtctgacaggcaaagaatggctggaagccttctcgctgtaggctgtcgagcagggagatggtgggtatataggtataacgctcactacgggactcgtgtttgtcctcactgaatacactgggcactacgcgaaacagctcttcacgggttaacggacggtcgcgacggataaggtttgctgcgccaaagcgcgaagccagacgggtcataagcagactcctcataacgggaaaacaaataaaagggatccccgtcgcatcggcgacaggggcagggaagtaacagggatgggttaaatactcagaagaagaaatcccagacggcgcgggccactgacaccaccgtggtgcgcacggcctgaatgacggcccgcaccggggcgggtatcaggggaaaggcactgatgctatcgagtacggccccgacggtttcaccaaaatcgctacgagcctgttcccggactaccgtcgtgcgaaaggaaggatggagttgcgacaccaccgggctggtggcctcacgtggcaggcacttaatcatccgctcggccatcaccttaagcccccattgtagacggaccgacacagcacacaccggatggacgggctggaacagctcatgcagcaggcagattttgcggctgatattctgcttctgcgccgtggacaactgtcccccaccgctggtaggttcggccttatccgactggctgataacaaacagcaccttatgccggtatacctctccaatcacctgatgataaaaatgttcatccaccgtcagcgcccggtcatcggccttaatcagccacagtaccaggtcgaggcgaggaagctgttcgcggtacagcgcagcatactcggtatcgcgagcgccactttcgcccacgccgggcagatccatcagcgttatatagcggtcgccgacttgcaggcgaaagcgcagtggctcacgtgtacaggccgccacatcgctgaccggtgatatatctccggcaaacagggcattgcacagactgctcttcccaacaccggttttacccataatgccgatcactggctcgtagttagttaactggttaatttgctgcagaagccgctctgatacccattgcggcagatcagcaagcgattgctgaaacgacttcaaaccttcagaattattcatcactactcctctgaaaaataataaaaaacggtagaatcgtgagattccgccgttaattgcgtatgttcagagtgatgatatatatctgaagattttttcaatcctctgcgcttgaggcagctgcgcgactgctggctcaggcaatgaatgagttataatagcagcatttactaacagggatttattgagagtatgagccgccgtgatacaccttaaaatctcaacccagcaaagtttcggagccgcgagcaaaagtgagagccttcacaaaataatgcttagtaataaagttactttgaattcagagccccgattaatgtgaacatgatcaacgaattttacccagattgagttcattcagtagccaggttttgaacacatcaagcgcagaatgcatgtgttggtgctgggggaaaaccaaataatgaccgatgtaatgtatttcgctggtactgtttacaagtgggcataccagtttaccgctagcgatttcacgttcagccagtagttttgattcaagcacaactcccaagccgtcaactgcggcagcaatcgccataaagctacggtcaaatcgaaggccataattattgggtggcgtcatcttattcgcctcaaaccatcctttccactggtacaactgcacatcgcactgaatcaatgtcaacgcatagagatcctctggtttctttagccgctcagccagttggggagaacacagtggcgtaagttcttcaacagcaagcgggatcttctcatagggtgatgggcggggttcaccgtagactatatcgagatcaaaatcatcctgttcaaaacgtgcatattctgtgctggctgaaagtcgcagatcgatgcttgggttctcacgtatgaacttaccaagacgtggtaaaagccattgatgggcaaaactcggtgcagtatgaaggcgcaaaggcctggattcatcagccgtcactaatgccaacccctgctgtaattcgttaaatccccgctgtatgtgctcaagcagtatttcaccttctttcgtcagcgtaatttctcgcgtactgcgctgaaaaaggcgtacatcaagcaagttttccagtttgcggatggcatggctgatcgcactgggtgacagttccaactcagaggcggccaacgcaaaagctccggtacgaccagccgcttcaaaggcgcgtaacagatttagaggtgcttttgctaagagcttcattcatgaatccttttcactagggatgaagtggtttactgaatttggccacctgaacagaggtgatatgctcacctcagaacaacacaggtgtcataatgaaaaaaagaaatttcagcgcagagtttaaacgcgaatccgctcaactggtcgttgaccagaactacaccgtggcagatgcagccagcgctatggatgtcggcctttccacaatgacgcgatgggtgaaacaattacgtgatgaacggcagggcaaaacaccaaaagcctcccccattaccccggaacaaattgaaatccgtgagctcaggaaaaagctacaacgtattgaaatggaaaatgaaatattaaaaaaggctactgtagattcaattggtcaacgcaacagttatgtgaaaacatggggttgcggaggttttttgaatgagacgaacatttacagcagaggaaaaagcctctgtttttgaactatggaagaacggaacaggcttcagtgaaatagcgaatatcctgggttcaaaacccggaacgatcttcactatgttaagggatactggcggcataaaaccccatgagcgtaagcgggctgtagctcacctgacactgtctgagcgcgaggagatacgagctggtttgtcagccaaaatgagcattcgtgcgatagctactgcgctgaatcgcagtccttcgacgatctcacgtgaagttcagcgtaatcggggcagacgctattacaaagctgttgatgctaataaccgagccaacagaatggcgaaaaggccaaaaccgtgcttactggatcaaaatttaccattgcgaaagcttgttctggaaaagctggagatgaaatggtctccagagcaaatatcaggatggttaaggcgaacaaaaccacgtcaaaaaacgctgcgaatatcacctgagacaatttataaaacgctgtactttcgtagccgtgaagcgctacaccacctgaatatacagcatctgcgacggtcgcatagccttcgccatggcaggcgtcatacccgcaaaggcgaaagaggtacgattaacatagtgaacggaacaccaattcacgaacgttcccgaaatatcgataacagacgctctctggggcattgggagggcgatttagtctcaggtacaaaaaactctcatatagccacacttgtagaccgaaaatcacgttatacgatcatcgttagactcaggggcaaagattctgtctcagtaaatcaggctcttaccgacaaattcctgagtttaccgtcagaactcagaaaatcactgacatgggacagaggaatggaactggccagacatctagaatttactgtcagcaccggcgttaaagtttacttctgcgatcctcagagtccttggcagcggggaacaaatgagaatacaaatgggctaattcggcagtactttcctaaaaagacatgtcttgcccaatatactcaacatgaactagatctggttgctgctcagctaaacaacagaccgagaaagacactgaagttcaaaacaccgaaagagataattgaaaggggtgttgcattgacagattgaatctacaaccgcgctcttgatgtcagactccctgaacagttctcgataatcgggaaactcagggcgcgttatcctgtggccactctctgccatgtgttcggggttcatcgcagcagctacaaatactggaaaaaccgtcctgaaaagccagacggcagacgggctgtattacgcagtcaggtacttgaactgcatggcatcagccacggctctgccggagcaagaagcatcgccacaatggcaacccagagaggataccagatggggcgctggcttgctggcagactcatgaaagagctggggctggtcagttgccagcagccgactcaccggtataagcgtggcggtcatgagcacgttgctatcccgaatcatcttgagcgacagttcgccgtaacggaaccaaatcaggtgtggtgcggtgatgtgacctatagtgtgcccggagttcagggcgggcatggatgcttaaatgaaccgcgagtctgtctggaatattgaaccggtaactcacgatgagaaacccaacaatcccaccgggtgtgacggtggagaacctgagcggcagtgacctgcggcatgcccgcagggtgatgtaacccgctgacaacggggattgaggcgagatcactaagccgagatgatcctcaaggttaagtactgaaaggttgaagaacatgaacccgttaatccgcctctgtgggttgaaaacgtcaccacggcctacgtgatctgacaggccgtgcaggaggaactggcagtgatacgtaagcactgccggtcgaaggtgttttgacatgtatgcgaaacaccggggcagcagcgtctatcacgcttgcgttgctgacttctgccaacttgcggcaagcaaggataaagagtgcgacgggcagcctcctcagtatgcctgagtccaggcaggtaaaccggggaaggtcagcgacggatgttaagggggcatggctccgatgacgcgctggctggcggagcttccgtagtagtccgcgatggggaaagcccattacatggcgaagggaagcagtttgaatgtgtttgcgacgtgaattaactgacctaacgaggtgaagacctttgataatcagcgaaatgcaacgcaagcttgccacatgggcagccaccgatccgtccctacggattcaacggctgctgcgtctgataacacaaccagaatggctggctgaagcggcgcggatcacgctttcatcaaagggggcccatacccccggcgttgatggcgtgaacaaaacaatgctacaggccagactggctgttgagctgcaaatcctcagggatgaattactctcaggccactaccagcccttgcccgccagacgggtttacatccctaaaagcaacggcaaactgcgaccactgggtatccccgcgttgcgggatcgtattgttcagcgggccatgctgatggcgatggagccgatatgggagagtgattttcatacgctctcatatggcttccggcctgagcgcagtgtccaccacgcgatccgcacggtgaaattacagctcacagactgtggtgaaacccggggacgctgggtgattgaaggcgacctgtccagttacttcgacaccgtacatcatcgactgctgatgaaggctgtacgccgcaggatcagtgacgcacgtttcatgactctgctgtggaaaaccatcaaggcgggacatatcgatgtcggtctctttcgggcggccagtgaaggtgtgccacagggcggtgttatatcgccgctattatcgaacatcatgctgaatgagttcgatcaatacctgcatgagcgctacctgagcgggaaagccagaaaagatcggtggtactggaataacagtatccaacggggccgaagtacggcggtcagagaaaactggcagtggaaacccgcggtggcgtactgccgctatgccgatgattttgtcctcatcgtcaaaggcaccaaagcacaggtggaagccatcagggaggagtgtcggggtgtgctcgaaggcagtctgaaactcaggctgaacatggataagactaaaatcccccatgttaatgacggctttatctttctggggcacaggctcattcgcaaacgcagtcgttatggcgagatgcgagtggtctcaacgatcccgcaggagaaagccagaaacttcgccgcatcgctgacagcactgttatggaaggtgcgaataagcggggaaattcttctcggctgactcagtcatttcatttcttcatgtttgagccgattttttctcccgtaaatgccttgaatcagcctatttagaccgtttcttcgccatttaaggcgttatccccagtttttagtgagatctctcccactgacgtatcatttggtccgcccgaaacaggttggccagcgtgaataacatcgccagttggttatcgtttttcagcaaccccttgtatctggctttcacgaagccgaactgtcgcttgatgatgcgaaatgggtgctccaccctggcccggatgctggctttcatgtattcgatgttgatggccgttttgttcttgcgtggatgctgtttcaaggttcttaccttgccggggcgctcggcgatcagccagtccacatccacctcggccagctcctcgcgctgtggcgccccttggtagccggcatcggctgagacaaattgctcctctccatgcagcagattacccagctgattgaggtcatgctcgttggccgcggtggtgaccaggctgtgggtcaggccactcttggcatcgacaccaatgtgggccttcatgccaaagtgccactgattgcctttcttggtctgatgcatctccggatcgcgttgctgctctttgttcttggtcgagctgggtgcctcaatgatggtggcatcgaccaaggtgccttgagtcatcatgacgcctgcttcggccagccagcgattgatggtcttgaacaattggcgggccagttgatgctgctccagcaggtggcggaaattcatgatggtggtgcggtccggcaaggcgctatccagggataaccgggcaaacagacgcatggaggcgatttcgtacagagcatcttccatcgcgccatcgctcaggttgtaccaatgctgcatgcagtgaatgcgtagcatggtttccagcggataaggtcgccggccattaccagccttggggtaaaacggctcgatgacttccaccatgttttgccatggcagaatctgctccatgcgggacaagaaaatctcttttctggtctgacggcgcttactgctgaattcactgtcggcgaaggtaagttgatgactcatgatgaaccctgttctatggctccagatgacaaacatgatctcatatcagggacttgttcgcaccttccggaggcgttatgagctggcggccctttttgtatctgattattaatccccacccgctattaagcgcccggcgcgggcatctgcgtctggtgcagggttgactttgcattctgttaacaaacgcggtataacaaaccttctttggatgtttagatgtccatacgtttagaaggttatatgcaaacaacacaacaaaatgcgccactgaagcgcacaatgaaaacgcgtcacctgattatgctttccttgggcggcgtgattggcacaggattattcttcaataccgggtacatcatttccaccactggagcggcgggaacgctgctggcctatctgattggtgcgctggtggtctggctggttatgcagtgtctgggcgagctgtcggtcgcgatgccggagaccggagcgtttcacgtttatgccgcgcgctatcttggtccggctaccgggtataccgtggcctggctttactggctgacctggaccgtggcgctgggttcgagctttaccgccgctggattctgtatgcagtactggtttccacaggtgccggtatgggtctggtgcgtggtgttctgcgcgattatttttggtctgaatgttatctccacgcgcttttttgccgaaggggagttctggttctcgctggtcaaagtggtcactatcatcgcctttatcatcctcggtggggcggcgattttcggctttattccgatgcaggatggctcgcccgcgccggggctgagtaatatcacggcagaaggctggttcccgcacggtggcttaccgattttgatgactatggtggcagtgaactttgctttttcgggtaccgagcttatcggcattgccgccggtgaaacggaaaacccgcgcaaagttatcccggtagcgattcgtactaccatcgcgcgactgattattttctttatcggcaccgtgtttgtgctggcagcgctgatcccgatgcagcaggtgggcgtggagaaaagcccgtttgtgctggtatttgagaaagtagggatcccgtacgccgctgatatttttaacttcgtgatcctgacggctattctttctgcagcgaactccgggttatatgcctccgggcgcatgctgtggtcgttgtcgaatgaacgtacgctaccggcctgttttgcgcgagtaacgaaaaacggcgtgccactgacggcgctgtcggtcagtatgctcggtggtgtgctggcgctgttttccagcgtggtggccccggacacggtatttgttgcgctgtcggcaatctccgggtttgcggtggtagcggtgtggctgagtatctgcgcctcgcattttgtttttcgtcgccgtcatctgcaacaaggtaaggcattgagtgaattacattatcgcgcgccgtggtatccgctggtgccagtattaggttttgtgctgtgcctggtggcctgtgttgggctggcattcgatccagcgcagagaattgcgttgtggtgcgggttaccgtttgttgcgttgtgctatggtgcttatttccttactcaaccccgaaacgcaaaacaggagccagaacatgtcgcagaataatccgttacgcgctcttcttgataaacaggatatcctgctgctggatggcgcgatggcgacggagctggaagcgcgagggtgtaacttagccgacagcctgtggtcagccaaagtgctggtagaaaacccggagcttatccgcgaagtgcatcttgattactaccgggcgggggcgcaatgcgcgatcactgccagctatcaggcgacgccggcgggcttcgccgcgcgaggtctggatgaagcgcagtcgaaagcgctgattggcaaaagcgtggagctggcgcgtaaagcccgtgaagcgtatctggcagagaacccgcaggcgggaacgcttctggtggcgggatccgtcgggccttacggcgcgtatctggcggatggctctgaataccgtggcgattatcattgtagcgttgaggcatttcaggcgtttcatcgcccgcgcgtggaagccttgctggatgccggggccgatctgctggcctgcgaaaccctgccgaatttttccgagattgaggcgttggccgagctgttgaccgcatatccgcgtgcgcgggcgtggttctcatttaccctgcgcgacagcgaacacctgagcgacggtacgccgctgcgtgacgtggttgcgttgctggcgggttatccgcaggtggtggcgctaggcattaactgtattgcgctggaaaacaccaccgctgcgttgcagcatttacacggtttaacggtgctgccgctggtggtgtatccgaactcgggcgagcattacgatgccgtgagcaaaacctggcatcatcacggtgaacattgcgcgcagctggcggattatctgccgcagtggcaggccgctggcgcacggttgattggcgggtgctgtcgcaccacgcctgcggatatcgccgcgttaaaagcgcgaagctgagggtttatcgggtctacatcgttcattgtaggcctgataagcgcagcgcatcaggcattgccggatggcggcacaagcgccttatccggcctacaaaaccacaaaacgttatgccgcatccgccagaacaaacatgccgtacggatggatttcaagataatactgctcgccgacgtccggttgcagacgcgtagcgttgacctgcaataatatctcctgcccgtgccattccaccgtcacttcatactgcggccccatataggcgacatggcggatcacgcagcgctggctctcttcgccgcgatcgctgagcgtgatcgcttccgggcgcacaccgaccatcccttcaccctgtgtaccaaagtgcagcgggcgcggcagatgatagccgtagatatcaacgtatccgtcgctgaaggttgccgggaacaggttggcatcgcccataaagctcgccataaagcgggaggcgggctggcggtaaagatcctgcggtgagccgatctgcatgatgtgtcccttgttcatcaccagcacagtatcagaaaccgcaaaggcttcgctctgatcgtgggtgacgtacagcgaggtgatatcaaactgcttttgcaactcgcggatcttgtcgcgcatgctgcgacgcaggttggcgtcgaggttactcaacggctcatcaaacagcagcactttcggcttgaggatcagcgcgcgggccagcgccacgcgctgctgctgcccgccggagatctgatcgacaaagcggtcttcgaatccttccagatccaccatcgccaacgcctctttgacgcgggctttcagctctgcgcgcggtacgccgagcattttcaggccataaccgacattctctcccagcgacatatgcgggaacagggcataggactgaaacaccatacagatatcgcgctgctgaatagagcgatgggtgacgtcttcgccatcaatgaaaatttgcccttcgctcggtttttccagcccggcaaccaggcgcaaaatagtggttttgccgcagccggacgggccgagcagcgtcaccatttgcccctgcgggatggtgaggttgatattgtcgattaccgtattactgccaaatcgtttagtgacgttgcgcagttcaacgaaatttttctgagtcatagtgcgctccattacgcctggtttttggcttttgaacgggaggtacgtgattcaccgatcagccagtcaaagatgaaaataatcgccagcatcaccacgatcagaatggaaccgtaggcaatcgctacaccgtattcgccatcttccacgcggttgaggatgtaagccgtcgctacgcgggtatccggcgtgacgaggaacacaatggcgctgacggtggtaatggcgcgcacaaagctgtaaatcagcgccgagaggatcgccgggcgcagcagcggcagcaggatgtgcgtaatggtacgcagggaaccggcgcgcaggctgagtgaggcttcatcgagcgatttatcgatttggcccggtaatgactccaacttattgatagtgttttatgttcagataatgcccgatgactttgtcatgctgctccaccgattttgagaacgacagcgacttccgtcccagccgtgccaggtgctgcctcagattcaggttatgccgctcaattcgctgcgtatatcgcttgctgattacgtgcagctttcccttcaggcgggattcatacagcggccagccatccgtcatccatatcaccacgtcaaagggtgacagcaggctcataagacgccccagcgtcgccatagtgcgttcaccgaatacgtgcgcaacaaccgtcttccggagcctgtcatacgcgtaaaacagccagcgctggcgcgatttagccccgacgtatccccactgttcgtccatttccgcgcagacgatgacgtcactgcccggctgtatgcgcgaggttaccgactgcggcctgagttttttaaatggcggaaaatcgtgttgaggccaacgcccataatgcgggcggttgcccggcatccaacgccattcatggccatatcaatgattttctggtgcgtaccgggttgagaagcggtgtaagtgaactgcagttgccatgttttacggcagtgagagcagagatagcgctgatgtccggcagtgcttttgccgttacgcaccaccccgtcagtagctgaacaggagggacagctgatagaaacagaagccactggagcacctcaaaaacaccatcatacactaaatcagtaagttggcagcatcaccgagaacacaaatgggctaattcggcagtactttcctaaaaagacatgtcttgcccaatatactcaacatgaactagatctggttgctgctcagctaaacaacagaccgagaaagacactgaagttcaaaacaccgaaagagataattgaaaggggtgttgcattgacagattgaatctacagcagctttttttaatatgtcccgttcgtcggtaacccgtttcagctctttctggagacggcggatctcggcctgagcatctgactgttctttattagtggaagaatccggaccgtacttctttatccaggcataaaggctgtgggtggtgatatcgagacgtgttgcaacgctggcaacagaataaccgagatcaacaacctgtttgactgcttcagttttaaactcttcgggataacgcttaccgctcatgggcacctctctttaagccattttaaatgactcggaggtgtctgttaaacccgtggcgattcaaaattgcgatatatacatacccatgactgcccagcgtatcggcttcaccagtcagcccgttacggtacagtgtgacacagtgcgcgtacctgggattcagctcacaggagagcagcatcagctccagatgtgcgacaaaatgcgggaaggcttcatccagttgtagagtctgcacctcactgaatgagccggtgaatccagcccggtcagccagaaaatgcagacgatgaccttcctgcaccagtcgtgctccgaaacacggtgtgatatctcgtttaagcccccaagtttgagtagagtctttattcataattttattcctgttaaagaagaccatgttcggcgaatgagaatatttgcctgccgccgacaatcaggtggtcggggacatggtgaacactttttaacatcctttacccatggtgatcgactttttcttcaggtcgatcacccccactttcgtgctgtaccaccacacctcgtagctgccgtcttcctgcatctccttcagcccgacccgttctcccctgaacgccttgcctgcgctcagacttacccctttcacgctcagctttccgctgatatccactttcctgaccatcaccccttcatcgtattccgggggcgttgtgttgccgctgtactgccgcgctgacggctgataccgcgagcccggtaccgccatatccagcgcctcgtgcgggcgttcaaggttatagaccgtccgccagtggtcgaaggcgcgctgcagttcaccgctgtctgcgaaccattttccctgcagcacttccgccttcaggctgcggtgaaaacgctccagcttcccctgcgtctgcggatgataaggccgggagtgccccacccggatacccaggcgcatcagccacagctccagcgccgtccaggtgccggtggtgtcgccccacggtgagccgttatccatggtcatccggtccggcaggccgtaacgctcaaacacgctgaccagctgctgctgcacggtctcgcgccgttcatcggtacagtgcgccaggcacagggaaaaacgggagtggtcgtccagcagggtgagcggatggcagcgtccaccgccaaaaggaaagtggcccttaaaatccatctgccagaggcggttcggcgcgtcgtgttcgaaccggcccgtggcgggaatgcccggtgaagcgcccggcagcaggccatggcgggccatcaggttatggacggtgctgaaggcgggcatggtgtgcccctggtcctcgagccagcgcttaatcttgcgggctccccagcgttcatgacggtcatgggccatacgcagcagggccgtgatgtcgtcagatgagcggttcggggaatggtgcggaatgcgcgggcggtcctgaagaccggcggcaccttcctgagcccagcgctggagccacttgtagccggtggcaggtgaaatgccgaagcgacggcagagggaacggatgttcgccccgtcctgcgaggcgaacaaaacaaactcagtacgtaatgacatggtatctctcgcatcccagggcataagcgactccataaacgggttcttatgccttagttgtaagtgtctaccatgtccccgaacaagtgttcactatgtccccggaccgtacaccccaaaggggagaggggactgcaccgagccatcttttccccctcgcccctttggggagagggccggggtgaggggcaatatgtgatccagcttaaatttcccgcactccctcttcccttccgatttacctctccttgttctgcgtcatagtatgatcgttaaataaacgaacgctgttctataatgtagaacaaaatgattcagcaaggagatctcatgccgcagtccgcgttgttcacgggaatcattccccctgtctccaccatttttaccgccgacggccagctcgataagccgggcaccgccgcgctgatcgacgatctgatcaaagcaggcgttgacggcctgttcttcctgggcagcggtggcgagttctcccagctcggcgccgaagagcgtaaagccattgcccgctttgctatcgatcatgtcgatcgtcgcgtgccggtgctgatcggcaccggcggcaccaacgcccgggaaaccatcgaactcagccagcacgcgcagcaggcgggcgcggacggcatcgtggtgatcaacccctactactggaaagtgtcggaagcgaacctgatccgctatttcgagcaggtggccgacagcgtcacgctgccggtgatgctctataacttcccggcgctgaccgggcaggatctgactccggcgctggtgaaaaccctcgccgactcgcgcagcaatattatcggcatcaaagacaccatcgactccgtcgcccacctgcgcagcatgatccataccgtcaaaggtgcccatccgcacttcaccgtgctctgcggctacgacgatcatctgttcaataccctgctgctcggcggcgacggggcgatatcggcgagcggcaactttgccccgcaggtgtcggtgaatcttctgaaagcctggcgcgacggggacgtggcgaaagcggccgggtatcatcagaccttgctgcaaattccgcagatgtatcagctggatacgccgtttgtgaacgtgattaaagaggcgatcgtgctctgcggtcgtcctgtctccacgcacgtgctgccgcccgcctcgccgctggacgagccgcgcaaggcgcagctgaaaaccctgctgcaacagctcaagctttgctgagccggacgataacgatgaccattgagaaaattttcaccccgcaggacgacgcgttttatgcggtgatcacccacgcggcggggccgcagggcgctctgccgctgaccccgcagatgctgatggaatctcccagcggcaacctgttcggcatgacgcagaacgccgggatgggctgggacgccaacaagctcaccggcaaagaggtgctgattatcggcactcagggcggcatccgcgccggagacggacgcccaatcgcgctgggctaccacaccgggcattgggagatcggcatgcagatgcaggcggcggcgaaggagatcacccgcaatggcgggatcccgttcgcggccttcgtcagcgatccgtgcgacgggcgctcgcagggcacgcacggtatgttcgattccctgccgtaccgcaacgacgcggcgatcgtgtttcgccgcctgatccgctccctgccgacgcggcgggcggtgatcggcgtagcgacctgcgataaagggctgcccgccaccatgattgcgctggccgcgatgcacgacctgccgactattctggtgccgggcggggcgacgctgccgccgaccgtcggggaagacgcgggcaaggtgcagaccatcggcgcgcgtttcgccaaccacgaactctccctgcaggaggccgccgaactgggctgtcgcgcctgcgcctcgccgggcggcgggtgtcagttcctcggcacggcgggcacctcgcaggtggtcgcggaggcgctgggtctggcgctgccgcactccgcgctggcgccgtccgggcaggcggtgtggctggagatcgcccgccagtcggcgcgcgcggtcagcgagctggatagccgcggcatcaccacgcgggatatcctctccgataaagccatcgaaaacgcgatggtgatccacgcggcgttcggcggctccaccaatttactgctgcacattccggccatcgcccacgcggcgggctgcacgatcccggacgttgagcactggacgcgcatcaaccgtaaagtgccgcgtctggtgagcgtgctgcccaacggcccggactatcacccgaccgtgcgcgccttcctcgcgggcggcgtgccggaggtgatgctccacctgcgcgacctcggcctgctgcatctggacgccatgaccgtgaccggccagacggtgggcgagaaccttgaatggtggcaggcgtccgagcgccgggcgcgcttccgccagtgcctgcgcgagcaggacggcgtagagccggatgacgtgatcctgccgccggagaaggcaaaagcgaaagggctgacctcgacggtctgcttcccgacgggcaacatcgcgccggaaggttcggtgatcaaggccacggcgatcgacccgtcggtggtgggcgaagatggcgtataccaccacaccggccgggtgcgggtgtttgtctcggaagcgcaggcgatcaaggcgatcaagcgggaagagattgtgcagggcgatatcatggtggtgatcggcggcgggccgtccggcaccggcatggaagagacctaccagctcacctccgcgctaaagcatatctcgtggggcaagacggtgtcgctcatcaccgatgcgcgcttctcgggcgtgtcgacgggcgcctgcttcggccacgtgtcgccggaggcgctggcgggcgggccgattggcaagctgcgcgataacgacatcatcgagattgccgtggatcgtctgacgttaactggcagcgtgaacttcatcggcaccgcggacaacccgctgacgccggaagagggcgcgcgcgagctggcgcggcggcagacgcacccggacctgcacgcccacgactttttgccggacgacacccggctgtgggcggcactgcagtcggtgagcggcggcacctggaaaggctgtatttatgacaccgataaaattatcgaggtaattaacgccggtaaaaaagcgctcggaatttaattattttaagagataaaaccgtctgcggaatatttcccgcagacggctttgttgtttttgaaatttattaatttaaacaattagttgagatatatcgttggcgtcacaaaagcaaaataacgtaattcggaaataagatatgaccattgctggttaattgaatagctcattacactccattaacacgatgttgtaattcggcacactacataagggtgtaattctgatgacgcaattaaccatgaaagacaaaattggctacgggctgggagacaccgcctgcggcttcgtctggcaggccacgatgttcctgctggcctatttctacaccgacgtcttcggcctgtcggcggggattatgggcacgctgtttttggtctcccgcgtgctcgacgccgtcaccgacccgctgatggggctgctggtagaccgcacccgcacgcggcacggccagttccgcccgttcctgctgtggggggccatcccgttcggcatcgtctgcgtgctgaccttctacacgccggacttctccgcacagggcaagatcatctacgcctgcgtgacctacattctcctgaccctggtctacaccttcgttaacgtgccgtactgcgccatgccgggcgtcatcaccgccgacccgaaagagcgtcacgccctgcagtcctggcgcttcttcctggcggcggcgggctcgctcgctatcagcggcatcgcgctgccgctggtgagcatcatcggcaaaggggacgagcaggtgggctacttcggcgccatgtgcgtgctggggctgagcggcgtggtgctgctctacgtctgcttcttcacgaccaaagagcgctacacctttgaggtgcagccgggctcgtcggtggcgaaagaccttaagctgctgctgggcaacagccagtggcgcatcatgtgcgcgttcaagatgatggcgacctgctccaacgtggtgcgcggcggggcgacgctctacttcgtgaaatacgtgatggatcacccggagttggcgacccagtttttactttacggcagcctcgccaccatgttcggctcgctttgctcctcacgcctgctgggccgcttcgaccgcgtcaccgccttcaagtggatcatcgtcgcctactcgctgatcagcctgctgattttcgtcaccccggcggagcacatcgcgctcatttttgccctcaacatcctgttcctgttcgtctttaataccaccacgccgctgcagtggctgatggcttctgacgtggtggactacgaggagagccgcagcggtcgccgcctcgacgggctggtgttctccacctacctgttcagcctgaagattggcctggcgattggcggggcggtggtgggctggatcctggcgtacgtcaactattccgccagcagcagcgtgcagccggttgaggtgctcaccaccatcaaaattctgttctgcgtggtgccggtggtgctctacgcgggcatgttcatcatgctgtcgctctacaagctcaccgatgcccgcgtggaggccatcagccggcagctgattaagcaccgcgcggcgcagggcgaggccgttcccgacgccgcgacagccgcatcccattaaccggaggcaatatggaaatcactaacccgatactcaccggcttcaacccggacccgtccctgtgccgccagggcgaggactactacatcgccacctcgaccttcgagtggttcccgggcgtgcgcatctaccactcccgtgacctgaaaaactggtcgctggtcagcaccccgttggaccgcgtgtcgatgctggacatgaagggcaacccggactccggcggcatctgggcgccgtgcctgagctacgccgacggtaaattctggctgctctacaccgacgtgaagattgtcgactcgccgtggaaaaacggccgcaacttcctcgtcaccgcgccctccatcgaggggccatggagcgagccaatcccgatgggcaacggcgggtttgacccgtccctgttccacgacgacgatggccgcaaatactatatctaccgcccgtgggggccgcgccaccacagcaacccgcacaacaccatcgtgttacaggcgtttgacccgcagaccggcacgctctcgcccgagcgcaaaacgctgtttaccggcacgccgctctgctacaccgaaggcgcgcacctgtatcgccacgcgggatggtactacctgatggccgccgagggcggcaccagctacgagcacgccgtcgtggtgctgcgttccaaaaatatcgacgggccgtacgagctgcacccggacgtaacgatgatgaccagctggcacctgccggagaacccgctgcagaagagcggccacggctcgctgctgcagacgcatacgggtgaatggtacatggcctacctcaccagccgcccgctgcgcctgcccggcgtgccgctgctggcctccggcggacgcggctactgcccgctggggcgcgagaccggcatcgcccgcattgaatggcgcgacggctggccgtacgtggaaggcggcaagcacgcgcagctgaccgtgaaaggcccgcaagtagccgagcagcctgcagccgttccgggcaactggcgggacgatttcgacgccagttcgcttgacccggagctgcagaccctgcgcattccgttcgacgacaccctcggctcgctcaccgcgcgcccgggcttcttacggctctatggcaacgactcgctcaattcgaccttcacccaatcgaccgtggcgcgccgctggcagcacttcgccttccgggcagaaacgcggatggagttctcgccggtgcacttccagcagagcgcggggctgacctgctactacaacagcaaaaactggagctactgctttgtggactacgaggagggacagggtagaaccatcaaagttatccagctcgaccacaacgtgccgtcgtggccgctgcacgagcagcccattccggtgccggaacatgcggagagcgtctggctgcgggtggacgtggatacgctggtctaccgctacagctactcgtttgatggcgagacgtggcacaccgtgccggtgacgtatgaggcgtggaagctgtcggacgactacatcggcgggcgcggcttcttcaccggcgcgtttgtgggcctgcactgcgaggacatcagcggcgacggctgctacgcggacttcgactacttcacctacgagccggtctaacggctcaggccgggtagcccagcgcgcgcgagagcgcgagcccggcctgctgaagctgctcgcggaaattagccagctccgcgtcgtccacgcgggaggtcagcgtcgacaggctcagggcggcgatgacgcgggactcgtggttccacaccggcaccgccacgcagcgcacgccctgctcgttctcttcgctgtccagggcgtagccttgctcgcgggtctgcgccagggcgctcattaaggcttcgcgagacgcgagggtggcgggcgtaaaggtagtgtactgatagccctccagtgtactgcacccattttgttggacgatgaaatggaatagcccctaatatgtcaaagccaaaatacccttttgaaaagcgccttgaagtcgtgaatcactacttcacaactgatgatggttacaggatcatctcggcacgttttggtgtcccccgaacccaggtcaggacatgggttgccctctatgaaaaacatggagaaaaaggtttaattcccaaacctaaaggcgttagtgctgatccagagttgcgtattaaggtcgtgaaagctgtgatcgagcagcacatgtcccttaatcaggctgctgctcactttatgcttgctggtagtggttctgtagccaggtggctgaaggtctatgaagagcgcggagaagctggtttacgcgcgctcaagattggcaccaaaagaaacattgcaatatcagttgatccagaaaaagcggcatcagcattggagctgtcaaaagaccgacgcattgaggatcttgaaaggcaagttcgatttcttgaaacgcggcttatgtatctaaaaaagctgaaagccttagctcatcccacgaaaaagtgaaagtactcaacgagctaaggcagttttatcctcttgatgagcttctcagggctgcggagataccgcgcagtacgttttattatcatctaaaggctctcagcaagcctgacaagtatgcggacgttaaaaagcgtattagtgagatttatcacgagaatagaggccgatacggataccgtagggtaacgctgtctcttcatcgagaagggaaacagattaaccataaagctgttcagcgcctgatgggaaccctctcacttaaagcagcgattaaggtcaagcgataccgctcttacagaggagaggtagggcaaaccgcccctaatgttctccaaagagatttcaaggctacgcggccaaacgagaagtgggttaccgatgttactgaatttgcagtcaatgggcgcaagctgtatttgtctccagtaatagatctcttcaacaacgaagttatttcttacagcctttcggaaagaccagtgatgaacatggttgagaatatgctcgatcaggcattcaaaaagcttaatcctcacgagcatcctgttctgcactctgaccagggatggcagtatcgtatgagaagatatcaaaatatccttaaagaacatggtattaaacaaagcatgtccagaaaaggcaattgtctggataatgctgtggtggagtgtttctttggaaccttaaagtcggagtgtttttatcttgatgagttcagtaatataagcgaactgaaggatgctgttacggaatatattgaatactacaacagcagaagaattagcctgaaattaaaaggtctgactccaattgaatatcggaatcagacctatatgcctcgtgtttaactgtccaactttttggggtcagtacacagcagggcgttcagctcggcctcgcccagccaggcaatcaacaccttgccgatggcggtggcgtgcaccggcaggcggcggccgatgcgtgaataggcgatggcggccagcttgccttcaatcttctcgatatagaccccttcacgcccgtccaggatccccagatgggtggtctgcccggtccgccgggacagctccgtcagccagccttttgccttctgccgaatatcgatggagcccacgacaaaatggccgcgctcgaccagcttcatgccgaggcgatacttgccgttctccgggttctgatcgatatagccgtgaagctgcagggtttttagcagcgagtggagggtactcttgctcagccccatcagtttgctgatgtcggtgatcttaagctcggtggcctgctcgttgaacaggtcgaggatctgcaacgcacgttcaacagactgaataatcggcataatgctggcatgtccacgctggaattaaggcgaaaacgtacctttttcgggatgaaaaatcaatgaaatggagccggtgttctccctctccctgtgggagagggccggggtgagggcaccaacgcgcagcggacccaatcactccccaagcgttgccatcatcaccgccttaatcgtatgcatccggttttccgcctggtcgaacacgatgctcgccgccgactcaaacacctcgtccgtcacctccatcccgccgtgcagatcgaactccttcgccatctgcttgccgagcgtagtctggtcgtcatggaacgccggcagacagtgcaggaacttcacgttcgggttgtcggtcagcgccatcatctgcgcgttcacctgatacccgcgcagcagcgcaatccgctctgcccacttctctttggcctcgcccatcgacacccacacgtcggtatagataaagtccgcgcccttaacgcctgccgccacgtcttccgtcagagtaattttcccgccgtgcttctccgccagcgcgctgcactccgccaccaggctctcttccggccagcaggctttcggggccaacaggcgcagatccagcccggtcagcgccgccgcttccagcatcgagttgcccatgttgttgcgcgcatcgcccgcgtagaccagcgtcatctcgttaaacgccttgcccggcaggtgctcctgcatggtcatcaggtccgccagcagctgggtcgggtggaactcgttggtcagcccgttccacaccggcacgcccgcatactgcgccagcgtttcgaccacttcctggccgtgaccgcgatactgaatgccgtcatacatccgcccgagaacccgcgcggtgtccttaattgactctttatgcccaatctggctgccgctcggccctaaataggtaacgcgcgcgccctggtcaaatgcggcaacttcgaaagagcaacgggtacgagtcgagtctttttcgaagatgagcgcgatgtttttaccggtaagcttctgtacttccttgccattttttttatcggctttgagctgtgcggcaagggtcagcagagaagtgaactgtgcaggggtaaagtcgagcagtttcagaaagtgttttttgtataaatcggacattttatcctcgcatggcgaacgccacttattgaattaaaattcactttatatgtgtaattattcatttgcaaccccatttcacaattctttcttacaaaggtggaggcaaacccgtccgtgtgtgaaaataatcgtatctgcctccgattctctgcagaagcagaaagacattggatcgaattctacaaccaggtcgagtcagaaatgagaatgattggccttctttatgattttaaggattatgcttctaaaatggcggagaacatggcgaggcttgctgccttacttcattacttcagcggtgatggaggcgatatatctgttaccgggtaatgactccaacttattgatagtgttttatgttcagataatgcccgatgactttgtcatgctgctccaccgattttgagaacgacagcgacttccgtcccagccgtgccaggtgctgcctcagattcaggttatgccgctcaattcgctgcgtatatcgcttgctgattacgtgcagctttcccttcaggcgggattcatacagcggccagccatccgtcatccatatcaccacgtcaaagggtgacagcaggctcataagacgccccagcgtcgccatagtgcgttcaccgaatacgtgcgcaacaaccgtcttccggagcctgtcatacgcgtaaaacagccagcgctggcgcgatttagccccgacgtatccccactgttcgtccatttccgcgcagacgatgacgtcactgcccggctgtatgcgcgaggttaccgactgcggcctgagttttttaaatggcggaaaatcgtgttgaggccaacgcccataatgcgggcggttgcccggcatccaacgccattcatggccatatcaatgattttctggtgcgtaccgggttgagaagcggtgtaagtgaactgcagttgccatgttttacggcagtgagagcagagatagcgctgatgtccggcagtgcttttgccgttacgcaccaccccgtcagtagctgaacaggagggacagctgatagaaacagaagccactggagcacctcaaaaacaccatcatacactaaatcagtaagttggcagcatcaccgaattttcagcccggatgtttcacgtacctatgtcgaatatctggccgataaggttgcggatcgagaagaggatgcagaggaatatctggaagcaatcatggaggctcgtgttaccgttgctggcatggggctggtgatggaggtgcaggattacttcgatggcgaggccgatagactggcgaaggcgtggctggccgagtacacaccgcaaatcaagtcgttgaaagatgagcgtaaagaggcctatcgtcaaatcgtcgaaatgagtaccgaaccgcaggatgtggatctggtcaggccggcgaacaagtttgaaatgaccagggtgcgtgaaggtgaaaaggaagctgaccttccagtctggaaacaccatttgttgtgtgacgaaagcgggaactatccggctctgttgaaccattgggaaaccaaggtttttgagatcgaaaccaaacgtgaaggatttgctttctggtatcgtaatccacagtacacagggcagtcgtcactgggaatcgcttatgttgaagctgaacagtacaagattgttcgtcccgatttcctgttctttgccgaacaggatggcaaaatggttgtggacctggtagatccacatagcctacatctggctgatgctttgcccaaactggaaggacttgcgctatatgccgaacatcattctgatgcttacaggcgaatcgaatctgtcgccgaagtaaagggtaaattacgagtgttagatttgaaacggcaggatgtgcaggatgctgttgctaccgctgaaaatgcagaaacgttatttagtagcggacttgctgatgactatcagtaatctatagaaaattgcgtaacgaaactgcattttagtaattttttgaaacaatacaaataaggccttctcactgagaaggccattaccgacttacagttcgatttggctacagccgaagttacggtctccttcaccaaacactttgctttcaactttggtcaggtagtccagtcgggttaacagcgcctggtagttctgctggaagtcagtactattggtgtctagcacatacttacagttttcaggaaaatggaccagaccagggtgatcgtctctctccagtctcagggcgctgtaccaggctcctgtgatcatccctctaaggttatcgtcctgatcgtaatccccgaggtggtagtaagcgtctttgttgaacaacaggcaaatgtgatagtggcatttacctgattcagaatactctttcgcccatataataaataaagggcaacggtaaatgcgtttatcctcacgcaccttacgggtacggtcagcctccagcttagctctgagggattcacgcatccgggatatcaccccaggttccaggttagggaagcaacagatattgtcaccgttatcaactattttgggatagtggagatcgacacgtacagcaattaacctaggataccggttagtcaaataacataataatttattaatcttactctgatattcgaggatatgtactccatgagtaccttgatatgttttcataatatatacctgtatttggtcctacggtctatagcagaccgtacagggatgccatacaggcagggctattcctggtcactgttgtcggtatatactggtatcagattttagtacggacatactgatctgattactactcttactggtgaatacaggtagtaagagtacacaatgccattatataatacctatccaacatctaaatttgagacgaaggtagccccagcctgtgatggctgttaaaaagttactctgcaattagcttctggaattaaccgatgattccgttattccagtgccgcttcacagtcgataaactgatactcaatttctttgcaatctcagcctgagtaaatccacctttcttaagtattgtgatatcacgtcggtatttgcttccctcctttcgtcctaattttttcttaacatgtcgatatcggcttttagttgatttcagattgtgaatgtcaatcgtatcctgacgagcaatcaaaaaagacaagcaactttcagcagaaggctctatccttgaagctggatggtagctgtagataaacatttctttttgaaggcaaaaaaataaaatattctgtaagtcctccacagttctgccaagacagcttagatctggaatgacaagcgtgtcctgccggttcatttcatgatgaatcaattgtctgagtaaacgttgctctgaaacaacctctttaatatctacctgctcgatcacaacatgttcaggtagaatattaaatttttggcatatctcagcaagtgagtgatgatctgtaatgctttcttgctgttcgctactgcatatggtgtaaaaaaatgaacgcatctgatgcactccggtgtcataaattattttttgatacctgaataatgtcattttgcataaaaaacaaccaaaaatagagagtgattgccagcgatactttaactggtaaagtagtattttacctctcataattgtttgtccttctttgttacctcttaggttctgctctcttgtgagtatgggtttataatgatgtcatccggtacattaacacggttggaaacatctgttttgcggagcactggcagcataaccaccatttcattgacatggtaaatatcaatccaacaaacaaccggataaggcataacaatcccctttcttctaagaacttcatttatcccgaatataatcaattgggatgttgacaagagtagagcctgcccggcatcaaagtaataaccctcaaaggttgttctatgaataagaataatgtttgaatatcctgagacactttgatgctttacatcaaaatgtctttgattgtaaatgtaaatggctttttccatatcgtaattttcccttagcgaggatagcctttcacgtataactgttttttcatctttccccatgaattcatcattagcgttcagttgaaagtaatctgcaatggggatttttaatggactcatgatgttcgttttccagattaacgaacagtactcttccagagttacttctgttttacctcggcttcgattgatgctttcttttatagagaactttaacaggtcattttttatttcatttattgaccagttatgacgattgcatttttctaatatagggatagccaaatccacaacttccgctattacggaagagtgagatttatttgttagtctggcataatgatcaattactcctaatgaagattgatttttgaacgtgactgagtgtttttttatgggagtagtctgtactacctgtgactcattgtttttgccttgacaaggtttttttcctggtagaacgctgctcatctcaaaattagtaacactattagacatttttaaggaaacctctttgttatctcaatataaaactactatctgaaatttctcagtgttgccccatttttctcggggcaacatcgctataaatcaataaaattaaatctgtaatttattacagactttctcgtacagaaaatgtatctataaaatcgaggacatctttacgtaaccagtaatggcggccattgatttgttttgggcgaggtagcccctcaggcaatttgtcctgacaaagccatttacgaatggtttgagatttgtagctaatgattttagctaactcagctgttgaaatgagctgtgattgagatgtatccgggagtttgaatgcgctcattttgccacctcagtgattgagatattggcaaagaaagctttaagcattattgaattagtaggggtagtaatgaaggcagaaggaaacgtttcgggctcggggtcggggtcactaccatcacctgaatctgatgataaggcacttttagctgatttagccgtactgtgatgcgatctggatgcctgatttttacatgacatcagacgcgcgagaaagttagtagcattttgcattctttgtttaagatgtaaaattttcagtttggcgcatgcgacagacttgcgaagagctgagtatgttcctttgagatactcgacaacctcttccatggacgcaggatcgttaaaggattgagttgttttacttgaattaatacaccagcgagctctgatagctgccagagtgggttctatggatacagttgctggggttgccattggcttatctcctgtgtagttgctgtatcattgactaaactgtgtattacgatacatgaaaatctatcttgatcaatagttgatgatattttgtaatatgttgatttttaatggaatcaacgcatatcaacgttgttttttatggtaatacctgcttcatttaagatccatgtctcaattttctcgtgccattttcgtaacagatctaacggacgacggcgatagtgtttttcggcaagagcgctgggtttgtgtcccataatttgagcaacaataccagtgggaacttcaacccactcggccaaagtaccaaaactacgacgtaaaccgtgaaggctgatatgtggtaactcagccagcactaatgctctgttgtgcgctgaacgcggctcaataattttgccacttttactgttacttctgaaaacccaaccctccttatttacgtcagaatttggggattgcgctagtacatttaacaattcagaaacataaggagtgagagggatgatacgttcaccttcgatcttgtctttaattcgcatgcttgaccatttgaaatctacgtctgaccagcgaagcgacgcaatttcttcacgccgagcaccagtgagcaaaagtacttggagataggccgatgcaataggattattgaggctacgcacggcactaaaccagctttttagttgttccttttgcaggcaatcatcagctttactcgctgacacgggaaccatttttcttacgttgtaatcttgtgccagatcgccaggaatgatcccttgatattttttctgataattactccatttgatgaaagcacgtagtaggcgataagcgtgagcagtgacggtaggtctattttgcctttctgtactcagccacgctgctatgtaatctggggttagctccgataacggcaggttgagcaaactagccaatggtccagccgaagtcgggccttggcctctttttttactttcgcctccacgactggacaagttaatgtgatcggcaatgtatcgagtagaatatgggcgtttagtttttgcactgataccggttctcaattcttgaagatagtcttcccaggcgacggagaaagtcacttttgttttacgtgattctgcctgcagggattctgcttctgcgatttttacagccttagcaattcgtggatctatccctgtatcgatcaatgtttgtaaccgtcttgcctcggctctcgcatcatcaatcttccagtcgttaatgttgccaatagtcatgcgaagggttttccccgcatatacgctttggaatacaaaggcttttgctccgctagttgctcggcatgccagggttgttacatctgcatcccaaagaaaagtttgttttttcccttccggtaaggtgaatctgcgaagtctttcgaaggtaaatttttgtcttgaaagcgccatttttcggctccagttgagaattgctgtcttacaataatgtaactgctggtgtaagtaaatggagggaataaacatcaacttttgttaatttcaatcaacgggtttattgctataacttggtgttttataatataaagtatgttgttttgattgattgctcaagtagttaaaaatgcattaacatcgcattcgtaatgcgaaggtcgtaggttcgactcctattatcggcaccattaaaatcaaagagttaccccatatttaaatacaccacgtttcctcctgtgccgtatttgtgccattgtaaccttggcaattcatcaaaatactgttctgacatcaggcagtgcaggtgcagacatttaagccaattgctgccgccattctttgacgtagtcaatcagggcgcggagctttggtgcaatattgcgacgctgtgggaaatacagatagaagcccggaaattgtggaagaaagtcatcaagcagcgatacaagcttaccgctttcaatatatggcctgaaagtttcctgagtggcaattgttattcctccgccggcaagagccagcctcaacatcagacgcagatcattagtcgtaatctgcggttcaatcgcaaggtcgaaagttctcccgttttcttcaaatggccagcgataaggcgcaacctccggggactgacgccagccgatacacttatgggtatttcccccggaggcgagaaagcactctccacgcccggccgcaaggatcaggacgacgggggcaggcatgaatcctcctcctgatggagacgtacagaggcgacttctgccagcacggagagtgccagagtatgcgcatcccgggctttggggaatatcccgacgggtgcccggatttgcgttgtttcctccctggaccatcccagctcgtggagcttttgcagacgtaacgtgtgggttcgatagctgcccaatgcgccgagataaaagggttttgcttctcgcgcggcctgcaacactggcagctcccggttgagatcatggcacagcaaaatgaccgccgtatcggtatcgatctgagcgctggctgaggccggaaaaagatcgaagatatggctgtcatagcctgtggctgctgcaagactcgcggttgcctgcgcctcaagagaacgtccgtaaatcatcagcctgacgcatggcctgaaccccacctcaaagccattgagattccagcccgtccgggtttgcgtgggcaggcacaccagcgattgtgcttgcggatcgtagcgcagccccaccggttttctctgttccaggcggttcagcacggcgagcagaggctgtgccgagcgtagtttatggagcgtcagcgtgatcccaccgccgcagggcagaacgatgtcaaaccacggcgaaccttcgccatagcgaatttcgcgatcgcggcctgagcccatcatctccagcgcttcaaaagcggcagcggcctccacgcagccgccagagacaaaaccgcagtaacgaccatcttcgcgcaccaccatctgcgccccgagcgggcgcgccgcgccgccgcgtatctccaccagcgtcaccagcaccgctcctttaccggacattagcgcctctacggcgaagcgcagaatggtccggtggtcatcggtgagaaacgcctgctctggcttatgccagtgttcgtctttgtcaaaaagcgggtatgacattgttcctccttaaaccacatccggcagcttatcgagcagcttatccagagtgatgggataatcccgtacccgaataccggtggcgttatacaccgcgttggcgatagccgcgctcacgccgcacaggcccagctcaccgacacctttggccttcatcggggaggatatggggtcggtatcatccaggaaaatcacctcctgttttgggatatccgcatgaaccggcacctcataccccgccatatcgtgattaacgaagtagcccaaacggtcatccaccgccagctcctccatcagtgccgcgcccatgcccatagtcattgcgccaatgacctggctgcgcgcagttttcggattcaggatgcgtcctgcagcacacacagcgagcatacgccggacccgaacttctcccgtcgcgctatgcacgccgacctccacaaaatgcccggcaaaggtcgactgctggtactctttgctcagtgttccgaattcaatgctctcttccgctgtcagtctgccgcctgcggtggcttcatgtagcgtggcgcttcgggtaccgttggtaatcttgccgtcggcaaactgcgactgctcaggatcaaacccgactgccgaggcaatcatttcgcgaagcttcatacaggcggcgtaaacgccggaggtggaggtattcgcgccccattgtccaccagaacccgcagaaaccgggaaactggaatcgccgaggtgaaccgcaacctgctccagcggtacgccaagcatttccgctgccgtctgggccagaatggtgtagctgccggtgccaatgtcggtcatgtccgtttctacggtaacggtgccgttttgttcgaggtgaacccgagcacccgatttttccagcagattattgcgaaagcccgccgcaacaccgtggccgactagccactccccgtcgcgcacctgtccgggtgtggcgttgcgctgcttccagccaaatttatccgctccggtgcgcaagcactcgataagctgacggcgagagaagcagcgcgtcgggtcggcggggtcaacctgagtgtcattcaggatgcgaaactcgacgggatcgatgcccgctttttccgccagttcgtcgatcgcgatttcgagcgccatcagaccgggggcttcgccgggcgcacgcatggcgttcccttccggcaaatcaagcgtggcgagccgcaggccggtatgacgattcgccccggcgtagagtaattcgctttgctgtaccgccgtttccggcgtgccgccgggcaggtttccagaccagctttcatgtgagatagcggtgattttcccgctctggtcggcaccgatacgcaagtgctgaagggtggcggggcggtgcgtggtgttattgggaatagaggggcgggggagcatcactttaaccggacgtttcaccgctcgggcggcgagggccgccagcagcgcatcgcttctcaggaacagcttgccgccaaaccctccgccgatatacggggagataatacgcacattctccacgggaactttcagcgtttttgccagatcggtgcggcaccagtcaatcatctgatttgaggtccagagggtaagcttatttccatcccagacggccatcgaggcatgcggctccatcgccatatggctctggtccggggtcgtgtaggtagcatcaatcttcaccgcagcggaggtgaaagccccgtcaaagtcaccgacgtttttgtcgggcgtgtcttccggcggctgattgacggcctgtttttcgtccgccagggagtaagctcctttattacggcgatagtgtgcctgcaccagcgaggccgccgctcgcgcctgttcgaaggtctcggccactaccagcgcaatggcctgatgatagtgctcaatagtggggccgcctaacagcctggcggtgtttttgtcgcctttgccgagtgccccggcgttactggcggtaatgacagccagtacgcccggcgctttttgcgcggcgtccgtatcaagggcggtgaggcgtcctttggcaatggcggaaccgacgatatagccataggcggcgttgggggcttcttcatgccattcgtaggcgtagcgtgccgtgccggtagttttcagcggtccgtcgatgcggtcatggggacgaccgacaaccttcagctgatcgatcgggttttcccctgcgggtttatcaaatttcatgcctgtgccctcgcttcagccagtacggaggcaagcgttcgcttcgccaacaggagtttaaaggtgttttcagcggtgggatgggcgctggcgaacagcgtgtcatatacggcctgcgccccctgggatagctgagcatccgcagcctcaatgcgccagggcttatgtgctactccgcccagcgcgacgcgcccgctgccgtcaggctgaataatcgccgcgaccgataccagggcaaaggcgtaggaggcgcgatcgcgcaccttacggtagatatgttttccgccgagcggtggaggtaacgtcaccgcaacgataagctcaccgggaagcagggcggtttcaatgtgcggcgtttttcccggagggtgataaaaatcagccagtgtgatactgcgagtctttccctccggcgtgatggtttccaccaccgcatccagcaaccgcattgcgaccgccatatcgctcggatgggtggcaatgcaggcttcgcttacgcctaccaccgcgtgctgacggctaaagccttcaagcgccgcgcagccgctcccgggcaggcgcttattgcagggctgattggtgtcgtaaaaataggggcagcgcgtgcgctggagcagattacctgcggtggttgcctgattacgtaactgaccagacgcgccagcgagcagggcgcgggagagtaccgcgtaatcacgacgcacgcgctcgtgagccgccaggtcggtgttccgtaccagtgcgccgatgcgcagcccacccgcgtcggtcacttcaatcttatcgagcccgaggccgttcacatcgataaggtgggtgggcgtttcaatttccagcttcatcaggtccagcagattggtcccgcccgcgataaattttgcgccgggtacgcgctgagcgctaagtgccgcctcggctggggtattcactcgttcataggtaaacgccttcatgattttatctcccccgcagcatcttcaatggcggcaaggatgttagcgtatgcaccacagcgacagatgttgccgctcatacgttcacggatctcatcggcagttgtttctggagcggaaaccaaatcgaccgtgacgtgactgggaatgccgtcctgaatctcttttagcaccgctactgatgagcaaatttgcccggaggtgcagtagccgcactggaagccatcatgcttgataaaggccgcctgcatggggtgaagattatctggcgaacccaggccttcaatggtggtgatctcggccccctgatgcatgactgcaagcgtcaggcaggcattaagcctgcgaccattgaccagcacggtacaggctccgcactgtccgtgatcgcaacctttcttggtaccgatcaaatgcagattttcacgcaaagtgtccagtagcgtggttcgggtatccacctcaagctgctcggttttgccgttcaccttcagtgtcaggggcattatctctggcgcgggtgtagctgccggaacgcttgccgccagcgtagaatgaggataaaccacggcggtcgccgctgttgcggcgctcactttaatcagatcgcgacgggtcaaacttaaatcgtgcggctcgtgcttcccaacccgattatcttcggggtattcgccttggttgctcataccaggcctccggtattctaaaggggaaaataagagtgcgttgcgagagtgctgatgcttttttaaacgttaagcatagtcggcgacagcaggaggattattcttaaaacgcgaatgcagctatgagcccggctaataaattcatgttcgccgggatgttgatgatgatgggagctggtttattgctttagttgtacgatgcaaaaaccaataaggaaacctgtgattttcagctctacatcaccctgcaaatctctgtcacttctaatataaaaatagggagaaatgatggagcttatattcattggcgattaggaaactatcttgttatacaaaacaatacagttctttacatttgccttgttttatgaatactcctgaagaggtgtataacataatggtacaagcagggtagatatgaatatatttgaacaaactccaccgaaccgcagacgttatggtcttgctgcattcattgggctgattgctggcgttgtttccgcattcgtgaagtggggggctgaagttccattgccgccacgtagcccggtggatatgtttaatgcagcgtgtggcccggaatcattaatcagggctgcaggccaaattgattgctcgcgtaattttctcaatccaccgtatatttttcttcgagactggttggggctgacagatcccaatgcggctgtttatacctttgccgggcatgtctttaactgggttggtgttacgcacattatcttttcgatagtgtttgctgtcggttattgtgtggtcgctgaagtatttccaaaaattaaactctggcagggcttactggcaggtgctttagcccaactttttgttcatatgatttcattccctctcatgggactgacgccacctctgtttgatctcccgtggtatgagaatgtttctgaaatttttggacatttagtctggttctggtctattgaaattattcgcagagatttacgaaacagaattactcatgagccagaccctgagatccctttaggctcaaacagataatgcattgaatgataaaaatggcgcaaatacagcgccatttttataggttaaaaacattgctttttatattctgatgcagatagtcagtgagtatatcgcgctacttcaggatgatgtagatccgaagaacgctacagaagagaggcattgttgctggcaaatagaagaagtatcgggttttgttacccctgaaaaacgaagccccgctattatcgctggcggggcagtgcaattaattattgtatgtttataacggtgtcagcccgtatttagcccttgcacgattgcaagcctcattgacgactccgttctcaccagacatggcgaattctctgcatgtggacgatcgatttttatatatcgtgcagcaggcatttttgcccggggttcctgcaagggcaatacatcgggggtttttctgattggtaccgctcatgcatcggtgaaaaggggatatttgttcagtgagcctggcgggaatagtaccgccagcatcgtcggcttcggcccagtaaaaagagacgcggaaaaatgcacaacaggcaccacacgtcatgcatggattcagattgctcataattcaccagtacagctaaaaatcgtaaagagaacagcggtacatcgtatgtaagaacgtaccgcggttggctggggaactttcgatagtgtgagtattgaatgatttccagccgttaccgattttacgtactaattcgtgattaaaccactcgttagcaggctgcctgatacctttccgtgtctcctgaacactatggtgtgcatatgagaaagcccatcgttacaggtgatattgacgatcgcttccacatcatttaaacgatttttggggctctgaggtggaattcttccctcgaccgatggataagtcttagtccgccgaagggggcttagccggacaggaatcgctaatcttaatgaatttgtcgttatagaccagatagtgattccccggctgacgtaactcaggctgatgaaccacgtctcccggacgtagataccaggcatcgccttcctcttcggtcgaatcacatcctggcttaatcagtagcttaaaccatgtgttgccagtgttacttaccgttcctgtcaccttgtcgaaggaccatttaaactgaacctgacgtggtcgtactaccagaatggtatccatcaccaccaccggctccgtgctgaccacgccgccggttgggctgcgtcttgtatggttacgagtggggacctcgcgaaatgagacccggtagtagcgctcgcggttatcccgtggaccatgatagtaaaatttaaaatactcgctctcaccagcctgcaacgccagctggcggggggcgaaaagcagttcaccatccaccggtcgggtgcgcaattcactgctgcccgggctatcaatagcactgatggcaatacggtatatccgtgcgcttttgttgttattcactacacgtttgctgacaaagtcagtctcggacggcagcgaaaatgtcagattgccgaccgaaatcgcctgtgtcaaaggtgccgccagcatacagaccgctgtcagcagggccttagttaatgttacgccacgtcgcctgaacatgaatctctcctgaagcgctgacttcgccaaaccagccgttatcatctaccgtacgcagcgaaatggcgttatccattggaatcgaaaatttgactgtggtcttatccatctgccccacttcgccagagatatcagtccacggtgtggtcaaccacagcgcatcggtcatatcccgccagctatcatcgcacccggcatcgtaggtttttgtagctccgttgcgggtaataaaggaaagtgtcgccgggaacggtactttcgccttaccgtcatcggagctgaagacacaataggagcgcccgccaatcacctgcgcgggtccggtcaccttgatcagcacttcgtcggcagctgttttaccgctggtggttacgatatagccgaaatcgagtgccgactcgccgctgccaacatatccctcccgcgacggtgtctgagtatattcatcggagataatactgatgctgaaatcacggggtttgataatcagcgtgttggaggtagaaaattcataccagccagactccggtgatgtggtgttctgaaagcgaaagttgaatagatctttggtgttgatatcgctgatcccgaggttcaccatctgcttaaagaagttgctcgagaagaaaacatagatcgagtctgcgctcttcatctcgttgaaggtgtagtaataggcggtattgctcaccggtttccatgaactgccattcagactgaactgcatatcgtacgccccgacggccgaggctaacgacgagttggcgatcgccgggaatatatggattgaggtgttgctgagtccgtttgtttgcagggtatagttaaccatcttacaacttaatcctgaacggctgccgatggtttgcgtccggcagtcggcgttcccttcgcccagagtcggtactccgtcgctgttgataaatacttccgccagcgagtgggtatttatcaaccgtagatttgctgctttcgtatgggtgacgttgcgaacataccagttgccggaggcctgatccttacagcgtgcgccgctgctggcgtcatagttcacagaggtctggcaggcattgatggtcattgtaaagctgctgccgacgggcatttgttgcatatactggtaaaacgcgtctgacaacatgccgtgcatccacttcgcgccgccgctggtcaccgtcgcgccataaaatccactggcgtcggtggtttgcggcaggataagactggtggtcatattacacccagcgtaccagttgatgcagcgcaagccagttaaaggagatgaaactggtgaattttccagccacatatcaaacttccagttggtataaaggccggtgttgtaaccgttatcaatgtagccgaggctttgctgatagatggttcctgaaccagtgtattttaaaccggtccagcggttggcaccggtcaggcgcggatccagcgccccgccaggagtgacgaaaaagttgtcgtctgagttgttttcgacaaacacaaactcgcgtgccggtgcatccgcccaggttgttttgctcactgccgctctgagcgcagttactggccagattagcgcgaaaattatcatcgttattagtaggttaactctcattctcttctcctgtctgcgtcaccgccgcccacgatgagaggccgctgcagaccacatcaccgacccagacggcaccgcgcgcctggttgagttccagagccacttcgcaggttttattgccactgtagcgaaaatcgatagtggggtatttcttatccacgtccatgacaaactcgccgttttcatcggttcgggttcggccgatatggttgttaatccgtgcgttagccagcagtgtgccgtcttccgcacggatacgaccggagacggtaaccatctgcttcacctctggctcaatgacagcgacattgcctggatagagagtcagacgacttttgcggccgctgacgatatcgtaactgtcgagtgagtttttgctgttctgtaactccacctcatatcttccatagggagagagcgggagatagttacgcttgccgttaagcgggaaaatccgcccgttgattttggcgctgatctgaccgtcgtcctccagcccggtgttgaatatcaccccagcgttgccatcagtccgcccgctggcagcaatgtttttaccctgccagccgacgctgccattggcggtcaagttggtattgacgtagccgtccgccgcgctattgacgttcagcgttccgctggcgtaacgagcgtcgaattgtgcatacgccccgccgctgagggttttgtcatcaccggtatcgccggagatggcacgtgacagattggcaccaacagtgcgaatggttccttcatcaaactgtttgcgtgctgacaggtttgccatggtgtagccgttttgatgagtcatccctgcgctaaaccagttgcccagtggtagcgagagatcgagagcgatatattttcctgtattggcgttgctgtcgccgttgttatagcgctgaataccggcccgcaggccaagcgaaccaaaggtaccgctgtagacattttgatagtaatctgccgtgtaataatggctgttgtaacggcggtcatcattgtagctgatgctgaatgtgcccagcttcgaccacagtgagttcaggttgagtgtgccgccgattgcacggttgtcggcatcgctacgtcgcaattgattgccaatgcgggttttttcctgattaacccacagcgaactaaagcctcccggtagagtggcgctgatgctgccgatgctgctccatgagctgtcactggccagcatattttgcaggttaacgttgatcgcccccccaagcggcagcgtcagacgggtttcacccaccgcctgattatcgtatccatatcccgttgccgcccagctaagcgtactcaatgagccggaggtcgaggcacctgctagccaactctctttagctggtcgcgtctttttcccgttttccgaccagcgatccatatgaaagctaccgccccatacctgccacgccagtggtgcaccgacgccgcgcccccggctaaacagcttattgacccgctgggtgcgtttgctgatcacgcgaccgttaacgatcacctcaacttccacatcgtaaatcccgtacggtagaccccgggtatccacttcatgattgcccatagtgaagttctgaacgcttagtagccgcccatcacgggtgagatgtacttcgcccgccgccggtaaaaaggcgatcactggcgtggctgactggctgctgtcgaagatggtggagctggcctggtttccccaggaaaggccgtaaatcttccctgctgaaatggcggtcatcggccctaaggactgcaagttccaggtgtcgagcattccaccggcaaatcggtgaccggcaaaatcgcgttcatacatcgctttatataattcactgtcctgttgaccgctaccgatcccgtacagcgagccgtcgagcaccacatgatgttcgcgcagtgcagtaacgttattcagcgacagatagctggatgtgttgctcccgccgttacgcaactggttgttatagacgcccaagttatagctcagattactgctgagggtgttaacactggactgcccgatgtcttcgctacgtgagcgtagtacggtgcccagcgcttcgcgcttgaccactagctgcagcagcagttggcgcaagctgagatccagctgcgcgttgtcagtcagggggatggtaagggcctcattgaacggggcgttggccagagccatcagctgctgtcgagtttgttcgctgacactggcgttatcttcactctcttccagctgtattttccggatgcgtagctgtccatcgtccagccagataaaagcgctgccgattcgctgatcgtcctggcgaccctggctaccggcgagatgaatatagagcgggacgctcatgccgtcctgaagcgcctgactgaaggcctgcggaataatcaccccacctatttgctgcgcacttatgtcagcagcgctggcatcgggctgaacgaacaaaaagaccatgccgaaggcaaactgggctttcagtcctggggagaaccgtcgtaaaggcattgtcgttatccatctgcacagctatctatttcacgggaatgaacttatcaccctgccaaagtgcaacccgtcctttgttatccgcagtgtccacgcgggtaaaacgacgcgacttgcccggcatcaggtagtaattctctttacactccttaccgttggcggctttcaggcaaggtccgtaggcgaggatccgcagcgtcgcatttcctgtatttgtcagggagccgttggcgtactgaaagtggtagttcgcctgacgaggggcgacgaccagaatggtgccgatgcgggcggaagcagtggccacagcgctgcggttggcattatcgcgctgcgcatcactgagggcctgatcaaaccagacaatgcggtagtagcgctctttttcatctgcgggtcccttatagaagaagcggatcacttcgctggcttgggcgggtagcagcaagctggcgggagtgagtagcaactcatccggcttgtccattgagataacctgcccgtcgtcaagcggtgaagagagccgttcgagacggatattgataaggcgaccactgtcggtactgtttttgatcgttttgctcagcgtgctgctgtcactgttcataaacgatgatatatcgccgacatccagcgcctgggccggagatattccggaaaacagcagagcgagaggcagaaggtgctttttcataacaattccgtccaggaataaagcaggggggctacccctgctggtacatcagagagattaactggtccaggtcgcgtcgaactgtacgctaacgtcgccgctccagatgccttccggtagagtgctgtaatctgttactgcggtggtaccattggtggtaccgctgatgatggagaaggtgaaaccatcctgtgcggtggtacgattgctggcattgtaaccgttagccagcgggctaaggttgccgcccagtacgccgttggcggtatcgatcatcacggtatcgccagttttttcgactgccgcgccgttataatccacgcccacattcagtgtggaacctgaggtatccaactgggttaatgtgttggtgataagacgtgaggtcagtttaaaggcggtagccgttgagtcaccctcgatagccacgtcaaatagacctttctgtgagttaaaacctttaatgccttcggcatactggaacgccaggctaccgagtggcgtcacaaccagcttactggtggtgtcttttttggctgttgccgaccaggtcgctacagcctgagctgttacgtcagcagcctgcgccacacccatgccggtaaacaccgttaccagagctattgccagaaccttttttttcattgcatttcttcccgagttgaattgaggacgtgatgtcccagtgagtcattttttaaaactaacttgcctggagtttactgaaccaacttatatatttttgagtacagcttggcctcagcattacgccgatgggtatacactgtcttcacactacaattttcaattctggcaatcgatttaggttgcattccctgggccgtcatgcggataatttccatttcccggtccgtgattttatctttcttaatatcttttctcaggaacctgccattaatcacatagaccagttcttttctaatatcacgactcagtccagcgtataccacgcccctaatattgctattgtaataccaataatttgctaaggcctctgactttctggccgcaatcaatacgacctgtttcccctttaccgcggataaccattcattatcacggtttataaattcagataaagaatccgtactgagattgataaacacgaaatcttttctaattttctccaacgatagataaattaatctgtcgatatccacaatcagttcagatagtcctttatagaagtaggcgtcatggggagaccagatgtatttatcagaacggttttgacattccatatggtttttaacctcatagtccctactgtaatcactttgccatgtcactactttccaaacctgtaatttttacaggtgcattcagtttccttagtaaaccggaagtaaataagatacgtagtacatatcaataaaggttaaacgagattaagtttaattattttcgattgggcttaaatttatgttttttttcccgatgagtgtcaatatgtgaacggaaaaggaattcaatggttaagtcaatatttagaaaaactgaaaatattgcttttttgataagaagaaaaagacatttggtttcataaggttattggcaatataacgttcaattcttacttgcattttatattggtcaggaactttgccctgaagtgttaggaatagtcttaatgcgctgtgtgatggactagtaaaaaaacaagttttaagggtaagggatagaatataaaactatgatgagctgtcattgaagatgatttgccaatcagtaagatattttaatggattaacatgccgcacaaaatggttacaggtgttcattccaataagtaatggaaaattgaacgggcgtatgtacgtcatctgttcggtaagcccccaagagccagattaagtgaagttaaacgaaggctgccagctgtcacaggaacgatggcctttttgtcagggcactgcattcagttatctgtgcgcgttactctaactggcactcgaacgtcggcgacggggttaccggtggatcagactgttcctgtggcgtaaacgtttttatgttagtaccaacagatttaccacatttatcatcttaacagtttgagtgaaaatgcaggctgcgccgcaaagggaggagactgagtggcgtgttcagtctaaaagagggttgatgccagcatacaggggcgaagctggtcaacaagtcaacattaagataatggaatattcggagagaaacgtcaggcagttggcctcaaatgaacaggaagaatatatccccaggaaaattaatgttggtgttataaacacaccaacattaatccgatctgattattaatcagacaaatatcgttaatccgtcgaattttgaatcaacgttttttcttacgaccctgaacggccttaaaacgtggattagatttacaaatcacatatagccgtccttttcgcttcacaatctgacagtctggatggcgttcttttgcggtacgcagagagttaagaactttcatcacgccccctttttcgtgctaacaaaacgaccaaaacgttgggtgaatcgtgcaacatttccttctgatgccactgttctcagcttccctgtatagaacgggtgcgatttagaagagacatcaattgtcacgtatggatacgttacgccatccagctcaatctcacggtctgttttgatagtcgagccgattttaaagtactcatcaacactggtgtcgtggaacaccacagtacgatactcaggatggatattgggcttcatcatttttacctgttatgttataacataaccataaagatacatgctcatccggatcatttcaacactcaatccctgtgactctttgtggatgtggaattttcgcaacggggaactctggcattgttagcagccattggtgacgctcccataaacgcctggatgagtgattgatgatggttttgctgagagtatggatttttcgagaatggaggttatctccactttactggccgataatttatcgcagtatgattgattacctgacagcgtgtattcctctcccacggatataataattacttacaaaaaagggagaggatgcatattttaaatatcactgaagtgaacagtttatttccgttattaatagaaatggagaaataaataggcgtattctacaattgcgacaaaaacaacgatattaatcagtttatgactgatttgctgtactttattctctttcattggtacttcctcgctttaaaaaagagtgcacttcgtaagtgcccttatataaataacgagtttggtcaaccaattttttgacatgtatcacaaatttgaatagatgtattacatcaactatcttttattgcaccaacgtcattgatatatgtcgcctgaagtcagttccgggaatgagtctgatctcaagactggcccagtccgggcgttgattggtgctgaggagcatatcgcatctcatcataatgtcgtatctcctggggtgttatacaagatatcgttgttggtgacctgggagagaaattgagttctattaaaccgtcaactatgccggatacatactggattacactgcaggcacgccttatgagagaacgtgccgcagtgacgggttaattatctgaaagaatttgtgaggctgtatcggttactcattgatttgatagttttactctcgggagaataatagatatttaatccattaacggaaaccagccagttcctttcgatgcctgaatttgatcccatagtttatccggaatggttaattcatgaacaagttgtgttatcgttcatgagaagcataacgtaaagggaaaagctcgattagacggcagaatttgtcaggggttatgaacgaaattcataaatctgtttgagtgttgcgatgggtagtgcaagttcgatatctccgcaatttacagtccgatgaaggaaaatgaatatccataaaaaatatattggtttatcctggcatatatacctatttcgacgtatttccaatagttttaattaaaggcaggtcattgttattcactctgaatagtgaattattcactgtccgcagagtaagaaatataacttaggtatctatttaatgacttgcacaaaaagctaaattttcccccataaataaaaatataatcccgcgcccaaccacctgatgagtggctataggcactggatatattaggtggcggtgcactttcttacataaaggtatttccttttctgcggaaaaggaaatcgggaaatccccggtttttctgacaagcagacgccattatttgtgtctgcctatgttcgttaattcgttcatcaggaaattatctcaatgtcacattataaaacaggtcataaacaaccacgatttcgttattcagttctggcccgctgcgtggcgtgggcaaatatctctgttcaggttctttttccactcgctgtcacctttaccccagtaatggcggcacgtgcgcagcatgcggttcagccacggttgagcatgggaaatactacggtaactgctgataataacgtggagaaaaatgtcgcgtcgtttgccgcaaatgccgggacatttttaagcagtcagccagatagcgatgcgacacgtaactttattaccggaatggccacagctaaagctaaccaggaaatacaggagtggctcgggaaatatggtactgcgcgcgtcaaactgaatgtcgataaagatttctcgctgaaggattcttcgctggaaatgctttatccgatttatgatacgccgacaaatatgttgttcactcagggggcaatacatcgtacagacgatcgtactcagtcaaatattggttttggctggcgtcatttttcaggaaatgactggatggcgggggtgaatacttttatcgatcatgatttatcccgtagtcatacccgcattggtgttggtgcggaatactggcgcgattatctgaaactgagcgccaatggttatattcgggcttctggctggaaaaaatcgccggatattgaggattatcaggaacgcccggcgaatggctgggatattcgtgctgagggctatttacccgcctggccgcagcttggcgcaagcctgatgtatgaacagtattatggcgatgaagtcgggctgtttggtaaagataagcgccagaaagacccgcatgctatttctgccgaggtgacctatacgccagtgcctcttacccagcaatagtggacacgcggctaagtgagtaaactctcagtcagaggtgactcacatgacaaaaacagtatcaaccagtaaaaaaccccgtaaacagcattcgcctgaatttcgcagtgaagccctgaagcttgctgaacgcatcggtgttactgccgcagcccgtgaactcagcctgtatgaatcacaactctacaactggcgcagtaaacagcaaaatcagcagacgtcttctgaacgtgaactggagatgtctaccgagattgcacgtctcaaacgccagctggcagaacgggatgaagagctggctatcctccaaaaggccgcgacatacttcgcgaagcgcctgaaatgaagtatgtctttattgaaaaacatcaggctgagttcagcatcaaagcaatgtgccgcgtgctccgggtggcccgcagcggctggtatacgtggtgtcagcggcggacaaggataagcacgcgtcagcagttccgccaacactgcgacagcgttgtcctcgcggcttttacccggtcaaaacagcgttacggtgccccacgcctgacggatgaactgcgtgctcagggttacccctttaacgtaaaaaccgtggcggcaagcctgcgccgtcagggactgagggcaaaggcctcccggaagttcagcccggtcagctaccgcgcacacggcctgcctgtgtcagaaaatctgttggagcaggatttttacgccagtggcccgaaccagaagtgggcaggagacatcacgtacttacgtacagatgaaggctggctgtatctggcagtggtcattgacctgtggtcacgtgccgttattggctggtcaatgtcgccacgcatgacggcgcaactggcctgcgatgccctgcagatggcgctgtggcggcgtaagaggccccggaacgttatcgttcacacggaccgtggaggccagtactgttcagcagattatcaggcgcaactgaagcggcataatctgcgtggaagtatgagcgcaaaaggttgctgctacgataatgcctgcgtggaaagcttctttcattcgctgaaagtggaatgtatccatggagaacactttatcagccgggaaataatgcgggcaacggtgtttaattatatcgaatgtgattacaatcggtggcggcggcacagttggtgtggcggcctcagtccggaacaatttgaaaacaagaacctcgcttaggcctgtgtccatattacgtgggtaggatcataaagtcctcgggtcgttgtccactcttttggcatgtcagcatattcacataccgtaccagcaaaagtttcaaccgtgagcaaatcgaccgattttgttgacggttcaaacgtggaaacgaaatagatatccgtcttaaaattcttcatacatctggctaaatgatgacgtcgtagtttgacttcttcatccggtgatttattcgacacttcaatgtcatatttaaatgagttgccaaaaataggtgtctcaggaaagttgattaatctacactccgtcttttgctgttgacgtattaaaaaagaagggaagatatttgcgagatcccaataatcacggtggcggtattcacggggagagcagccgaataactttttaaattcgcggctgaatgactgctgtgaatcaaaatgcaaagagagtgcaatatcaagcatagatttcgcggtgagccggacaagaatggcggcacgacaaagccttcgtttgcgaatgtattctcccaaaggcacatgcatgaaatttcggaacagaagctggatgttgcgtctgctgtagccagatttctgtgcgatatcttcgattgaaatagggtgctcaagattgcactcaatccactccaggagctgctgtagaatcttctgcctgatcatctcattctccgttaattctttgtcatatcgcacattttcgttataccctgggccctaagtgtatcaaaaatagcaagggcgaaggcaaaagcactggtagcgtctgcttcgttgtccccgaaaatagagaggtttcagtcctacattattaatgaattttttgcataagtgatatcaaaatccacatactactttgaggttacgttttaacgtagactcattgttcatgcctaatggagggactgacagtggaattttccgtatagtctgcttcagagtattgcagatgcccatcaaaaatcgatttctcactgacagataaagaaatggcacaaattagttcgcttgatttgggttatgttggggagtcggtaaaacattttaatcctgaatttgttcgtggttgtcttgctgtaaaaatacatgattgatattaatcatgtattttacctaagacgacaaaaaccttttaacagggagtgatattgatcttcactctgtcatatctccggtaatatggcgtcaggcttcatcatcagaaagggggcctgacgcctgaaaaagtgaacaacagacagtgttcggattatcaatattcagtttttaacgttgaactggattcattactgcgttgtttaagaatttcccgcgccgaatctgccattatcatgactgcacctgccagcatcagagtatctttcaataccaggcgaccagcaccggataaataagggaaaccatgatgagcgtcacccaatgcgggtacccatgcctccggggtggtgattaaaaatgagagtgttaccagcggcgtggtaaatgccatcagtcctcccaataaacctaaccagcgattgacaggattagccaaaaccagcagagcaataatcacctccacgacgccaagaccgttggaaaaaccataggtattattggccgtttgccatgcccttgcttctggtttgtattcgccttcgtgagtcagatactgtttatagtcttccgggtgttcataaaagaacgacattagtggactgtttgcgacgaatggtgtaatgctgtctgcctcgtaagggacaaactttaataacccaatccacataaaaacaattgcaatactcagacgaatcaatgtcaggccaattttatctccccgacttaacaggtgcaggtatttttccattgtgaacatccttatttatacaatactgctgttgcggttgaattattatcaattcgcatcgatgtgactttccaggatgaagcattatattttctggctatatcagcaatggtatcctccagaactgtcggtgatgctgatactgacgagacgctgatatgtttcagaattattttatcatctgcattggtggaaaatgccataacgccagataatagtgttgcaaataaaacagattttttaaacatataaaataccatcaatgaagtgattaagaagttatagagtaacagagaattaataagattcttttctctgagacgccagaatatttgttctggcgtctgattttgagtttatttgactaatgaaaatagatcattgagtgattcgctcatcgacggatgagtaaatatctgatcgcgtaatatgctataaggcagcccggcatccatcaccattttcactatattgatcatctcgtgggagtcaacacacagcagtgatgcccctaacatacgttgggttttattatcaacaatcgcttttaataccccacgagtatcattcatcactctggcacgcggaattgcagctacaggcaatgtcaccacctgaatatcagcaccactctctctggcttgttcttctgtcataccaaccctggacaggggcggtgtcataaatacggaataaggcacatttttccgatcatcagtactacgtttgccttcacccagtaactcatcacgtacaatgcggtaatcatccagtgatatgtaagtaaattgcagcccgccggtaacatctcccatcgcccaaatattgtctgcggtggtatgtaatcgcttgtcaacgacaattgccccgcgctcgtttactgcgataccggcattttctggatgtaacgaagcggtagccggttgacgaccggaagctattaacagtgcatccaccgccagttgggcgtgctcgctatgcacttgcacttgattttcatggtgactgattcgctccacatgggcattgaggataatatcgacgccctgatcgcgtaaaatcgtcgcgatattatcagcaatatcccgatcttcccgaggcaaaaacagcgaagctgcttctaaaatggttaccttgctgccaaaattagcgaacatagaggcgaactcaacgccaatatatccgccgcccaaaatacctaaatgcccaggcaattcttttagattaagtaatccggtgctgtcatatactcctggcgtggtggtaattccaggaattggcggaaccacggtttgtgcaccggtattaataaaaattttctcgccatgaatttccagatttccctcaggccgatgaacacgcaggctatgattattgataaactccgcctggccgtcgatcacgtcgatattgggcatatccgcaagattatgaaaattcttattacgtaaaaaattaaccacttcatttttacgctgtatggcacggacaaaatctgtgtgctgctgtgcgtcatgaaccaatgttttggttgggatgcagccgatattaatacaggtcccgccatacattgcatttgattgttcgatgagagccactcgccaacctgcttttgccagcgtgacggctaatgtttttccagccttgccaaaaccaataatcactgcctgatatttattcatgatgatttcctgtcgaaacgcgttcatttgacatcatgactatagacgcaaaagagcaaataacatttcttcacaacgcttgatattttgtcttatcgtctgatattttctttttcttaatcagaatcacaaaacaaaaatcatgattaactatttgatggtattagattagttatttactaagattgttggtgtttgtaatcaaaaaccactcaggagtctgatatggatgcccttagccgtttgttgatgcttaacgctccacaaggaacgatcgataagaattgcgtgttaggaagtgactggcagcttccacatggtgccggggaattatcggttattcgttggcatgcgttaacgcaaggagcggcgaagctggaaatgccgacgggggagatttttacattacgcccgggaaatgtggtcctgctaccacaaaattcagctcatcgcctgagtcatgtcgataatgaatcgacctgtattgtctgcggcactcttcggttgcaacattcggcgcgttattttttaacgtctttgccggaaacgctgtttttagcaccggttaaccacagcgtggaatataactggctgagggaggcgatcccgtttttacaacaggaatccagatcggcaatgccgggagtggatgcactgtgtagccagatctgcgctacattctttaccctcgcggtgcgtgagtggattgcacaggttaatactgagaaaaacattctcagtttgcttctgcatccacgtcttggtgcggtaatacagcaaatgctggaaatgccaggacacgcctggaccgtcgaatcgctggccagcatcgctcacatgtcccgggcaagttttgcccagcttttccgtgatgtttccggaaccacgccgctggctgtattaacaaagttgcgtctacaaatagcggcccagatgttttcccgggaaacgctccctgttgtggtgatcgctgagtcagtaggctatgccagtgaatcatcttttcacaaggcgtttgtccgcgagtttggttgtaccccgggagaatatcgggaaagggtcagacagcttgcaccctgaataaaaccgccagaaatcagggcaaagataatccgcattccgggagttgtgagcctttcaactatttctatttccaacggtggtttgggctttatatattttttctgatggactctagctcagtttttaaataaaaatgcaaactaaattgcttcaattaaataaaatcccgactattacttgatacgtgattattgtcggtgatttttttgtacaccatcagtgtatatctcaataacccctgaataagtagctctgaataggtataagggatgtagccatttttaaatggatttcttatgccaaaaatgatcgtcgatttccccataaaatgtgagcgatgccgaaagaaataaaattagttattgcatttgacgtttggatgaaagattatcatttgtcatacaaatgaggggtggtatgttgctagccaattaaaaaagaacgccatatttattgatgattgatcccccggtgggggggaaacatcgggcataaatgggcatgaagtaatggagtattagttgtgaatgtcaatttctttgtcacctgtattggtgacgccctgaaatcaagaatggcacgagactccgtgctgctactggaaaaactcggctgtcgcgtaaatttcccggagaaacagggatgctgcggtcagcctgcgatcaatagcggttatatcaaagaagcgattccagggatgaaaaatctgatcgccgcactggaggataacgacgatcccattatttcaccggctggctcttgcacctatgccgtaaaaagttacccgacgtatctggcggatgaacctgaatgggcatcacgtgccgcaaaggttgccgcgcgtatgcaggatctcacctcttttattgttaataaattaggggtagtcgatgtaggtgccagtttgcaagggagagcggtgtatcacccatcttgtagcctggcccgtaagctgggagtgaaggacgagccacttacgctgctgaaaaatgtgcgtggactggagctgttgacctttgctgaacaggatacctgctgcggatttggcggcacgttctcggtcaaaatggccgaaatatccggcgagatggtgaaagaaaaggttgcgcacctgatggaagtccgccctgagtatttaattggtgctgacgtgagttgcctgctaaacatcagtgggcgattacaacgggaagggcagaaagtcaaagtgatgcatattgctgaagtgttgatgagccgctgaggatataaagatgtcgatcaaaaccagtaatacagattttaagacacgcatccgtcagcaaattgaagatccgatcatgcgcaaagcggtggcaaacgcgcagcagcgtattggggcaaatcggcaaaaaatggtcgatgaattggggcactgggaggagtggcgcgatcgggccgcccagatacgtgatcatgttctgagtaatctcgacgcttatctgtaccagctctcagaaaaagtgacgcaaaacggcggtcacgtctattttgcaagaaccaaagaagacgctacccgctacattttacaggttgcccaacgcaaaaatgcccggaaggtggtgaaatctaaatcgatggtgaccgaagagattggtgtcaatcatgtgttgcaggatgctggcattcaggtgattgaaaccgatctgggtgaatatattctccagctggatcaagatccgccatctcatgttgtggtcccggcaattcataaagatcgccatcagatccgtcgagtgctacacgaacgtctgggctatgaggggccggaaacgcctgaagcgatgaccttattcatccggcaaaaaatccgcgaagatttcctcagtgctgaaataggtattaccggctgtaatttcgcggtggcagagaccggttcggtatgcctggtgaccaatgaaggtaatgcgcgaatgtgtaccacgctgcctaaaacgcatattgcagtgatgggaatggagcgtattgcccccacgtttgccgaggtagatgtattgatcaccatgctggcgcgcagtgccgttggtgcacgtttgacgggatacaacacctggctgacaggaccgcgcgaagctgggcacgttgatggtcctgaagagtttcatctggttattgtcgataacgggcgttctgaggtgctggcctctgaatttcgggatgtgctgcgctgtattcgctgcggggcttgtatgaatacttgtccggcatatcgccatattggcggtcatggatatggctctatttatccagggccaattggtgcggtgatttctccgctacttggcggctataaagattttaaagatttaccctacgcctgctctttatgcacagcttgtgacaacgtgtgtccggtgcgtattccgctgtcaaaactgattttgcgtcatcgtcgggtgatggctgaaaaagggatcaccgcaaaagcagagcaacgggcgataaaaatgttcgcttatgccaatagtcatccaggattgtggaaagtcgggatgatggccggtgctcatgcggcaagctggtttatcaatggcggcaaaacaccactcaaatttggcgcgattagcgactggatggaagcacgcgatcttcctgaagctgacggagagagtttccgtagttggtttaagaaacatcaggcgcaggagaaaaagaatggataatcgaggcgaatttttgaataacgttgctcaggcactgggtcgcccgctgcgacttgaaccgcaagcagaagatgcgccgcttaacaactatgctaacgagcggcttacccaacttaaccaacagcagcgctgtgacgcgtttattcagtttgccagcgatgttatgttgacgcgctgtgagctgaccagcgaggcgaaggcggcagaagctgcaatacgtctgtgtaaagagctgggagatcagtcggtcgtgattagcggtgacacgaggctggaggaattggggattagcgaacgtttgcagcaggaatgcaatgccgttgtttgggatccggcgaaaggtgccgagaatatctcgcaggcagagcaggctaaagtgggtgttgtgtatgctgaatatggtttaaccgaatcgggaggcgtggttcttttttccgccgccgagcgcgggcgttcattgagcctgctcccggaatattctctttttatcctgcgtaaaagcactatcctgccgcgtgtagcgcaactcgcagaaaaattgcatcagaaagcgcaggccggtgaacgaatgccttcctgcattaacatcattagcggccccagttcaacggcggatattgagcttatcaaagtcgtcggagttcatggcccggtgaaagcggtgtatctgattattgaggattgttgagagagatatgaagtctggacataaacctgaagaaggcatacgaggttgaaaatagcgtttaggacaacctgacttaaccccgttccgtcatggttatgctgctcttctgtaaatatcctggtattaccaatgccaggatatttacagtgaaaaagacaggcatccattcctgaaaacgggttcccttcccggtcattgtcacttcagctttatacaggcactctctatcagaatgttgtttattactgcccagagttttgttggtattcatctaccatttttttgacaaggcaaaacattacagaaattacaatgcttagaaaaaatcccagagccaggcaaatggcagcagggtatttattttttatttctggtgagcttatagttacacagccatcaccgttcggatacaatgaccagttcctggtcaggtatatcatttttgtataaagctcactgttaattgctgaaggcgtttgtatctcatcgagaacttgcctgccattatgatattctgacgcataccatttgataatagaggcctgcacgcgagatatttcctcttcagcagttggtaaagctctcttatctcctgaccattccagccttatttctctgttcttgacatctgggctggtgtgaaaaaatgtagtaattcgctgaataacatcttcagtcattgtagtctgacaggcaaaattattattgctatcacagctaacaagtatacctggcgttgtctggtttatttttaggctgtaaatcacttttatattgtctttattgatatacagaaacaacagcaccatagccatacatatagccataataaaaaggataacacgaatctttttcttcagataaaataaaatctcaatcagatcgatatcctgtttgatttgttcacgcataatatatccagagaataaaatctgtcgcagataaggttgtattaatagtctgtatcaggaatgttcgggttaaatatcagcaaaaagcccgcatcatgaatactggatatgaagcatgagagttacctcagtgtttatataaggattcggtccccctctctggaacggtaactctcaatctgatcggttcctgcgttagttcacatcacgactcattttttcgctctcaccggcatcccatttgccacaaaatatcccgccgtgctcctcggcagcgcttcctgtccacgaatcatatccgctattttctcgccaatcataattgtcgtggcgttcaaattcccggtgataatctgcggcataatcgacgcatccaccacacgcaggccttctaacccgtgtacgcggccttcgccgtcaaccacggacatctcgtcgtaacccattttgcaggtaccgcacggatggaaggcggtttcggcgtggttacgcacgaactcatcgagctgttcatccgtctggcattcgacaccggggctgatttcgcggccacgatactgatccagcgcgggttgatgcatgatctcgcgggtgatgcgaattgcgtcgcggaactcctgccagtcctgctcgtgcgacatgtagttaaacagaatcgccggatgctggtgcgggtcgcgggatttaatccgcacatgcccacggcttggcgagcgcattgagccgacgtggcactggaaaccgtgctctttcactgcattcgagccgttatagttaatcgctactggcaggaaatggtactgaatattcggccacgcaaattcctcacggctgcgaataaatccacctgcttcaaagtggttgctggcaccaacgccagtgccgccaaacagccactccgcaccgattttcggctggttccaccactgcagggcagggtagagggaaaccggttctttgcactcatattgcagatacatctccagatgatcctgaagattttcgccgacgccgggtaattcatgcaccagcggaatatcaaactccgccagcagttcagcgttgccgacgccggagcgttgcaggatctgcggtgaggcaatcgcgcctgcacataacagcacttctttgttggccgttgcgcgggttgggatggtgctgtcgccttccagccattcgacgcccaccgcgcgtttgccgtcaaaaatgatgtgatcggtcatagcgtgagtacgaatggtcaggttaggacgcgatttggcctgatcgagatagccacgcgcggtgctggcgcgacggccctgcggcgtgacggtgcgatccatcggaccaaaaccttcctgctgataaccgttgagatcgtccgtgcgcgggtagcccgcctgcacgcccgcttcaatcatcgcttcaaacagcggattgacgccgggtttggaggtagtgacgctcaccgggccatcaccgccgtgatagtcgttttcacccatatcgcgagtctcggccttgcggtagtagggcaggcagtcgaggtagctccagttctccagaccgggttcttgcgcccagttatcgagatccagcgcattgccacggatgtagcacatgccgttgatcagcgacgatccacccagacctttaccgcgtccgcactccatgcggcggttattcataaacggttcaggttccgtttcataggcccagttgtagcgtttaccctgtagcgggaatgccagggcagcgggcatctgggtgcggaagtcaaagcgatagtccgggccgcccgcttcaagcagcagcacggaggtattcggatcttcagtcagacgggtagcgagaacgttgccggctgagccggcaccaataatgatgtagtcaaattgcaaataaacctcctggttagaatatggactggaatttagccatctcaacctggatggacttcacctgggtgtaactctggagcgtcatcacgccgttctcgcgaccaatgccggagtgtttgtagccgccaacgggcatctctgccggggattcgccccaggtgttgatccagcaaatacccgcttccagctgatgaatgacgcgatgcgcgcggttcaggtccgctgtcacgatgcccgccgccaggccgtagtcggtatcgttagcgcggcgaatgacttcgtcttccgactcgtaggtcagaatggacatcactggcccgaagatctcttcacgcacgatggtcatatcgtcgctgcaatcggtgaacactgtcggtgcaacccatgcgccgttatcgaagccatcgcctttcagtacatcgccgccgcacagtacgcgcgcgccttcctctttgcctttggcgatatagcgcagcacgttatcgcgatgcgggaagctgaccagcgggccgaagttagtttgcggatcgaaaacgtcgcccgcgcgaatgcgctcaacgcgcgccagaattttctgctcaaatgcggctttgcatttcgccggaacgaagacgcgggtgccattggtacacacctgaccggagctgaagaagtttgccatcatggcgatatcggcggcgagatcgagatccgcatcatcgaaaacgatcagcggtgatttaccgcccagttccatggtcacttctttcagggaagaggccgccgagttagccatcacttttttgccgctggcgacaccgccggtaaatgacactttggcaatgcccggatgctcggtcagatattgcccggtctccgcgcccacgcccggcaacacgttaaatacgccgtccggcaggcccgcttcgctgtaaatttcagccagctttaacgcggtaagcggggtaacttcgctcggtttgaaaatcattgcgttgcctgccgccagcgccggggcggatttccacagggcaatctggatcgggtagttccatgcgccaatccctgccactacgcccagcggttcgcggcgggtatacacaaaggacgtttcacgcaacgggatctggctgccttccagcgccgggatcagcccggcgtagtactccagcacgtccgcaccggtaacgatatcgacggttgaggtttccgaatatgcttttccggtgtcgagggtttccagttttgcgagttcgtcattgcgttcacgcagaatatcaacggcccgacgcagaatacgcgagcgctccatggcggtcatcgacgcccagattttttgcccctgctgggcgcttttcacggcgcgatcgacatcctcgcgcccggcggcctgcacggtcgccagcacgttaccgttggccgggttaatggtctcgaaggtgcgaccgctggtggcggaggtataaccaccatgtatataaagctgctgttctgccattcgggacatcacgtctcctcggttaatcggtgggtagatgctgagtgataaagtggcgggtcagggaattagcgcgggttttatccagcggtttgccgctcagagccgcgcgcagccataatccatcaatcagcgcggccaggccgtagcccgcttcctgtgcctgttcgcgcggcaattcgcgacgaaactcgctcaccagattcgacagcaagcggcggctgctgacctgctgtaaacgatagagcatcggctgatgcatactgctggcccagaacgccagccaggctttcatcgccgcactgctcacctgcgtttcatcgaagtttccgccaacaatcgcctgtaatcgctgctctgcactgccctgcggaagtgcatgtaatcgattcaaaaccgcgtcacgcagctgactggtgatatcgcgcatggttgcttccagcagaccatttttgtccctgaaatagtggctgatgatccccgtagaaacgcctgcacggcgggcgatctgcgcgatcgttgcatcgtgcatgcccacttcatttattgcttccagtgtggcgtcgatcagttgtctgcgccggatcgactgcatccccaatttgggcattttcgccactccattcatcagcggtgtttatctattaaagcggttattgattggacgttcaatataaaatgtgtcttaattgttacgaatttgattttaaatagtaacaataacagtggggatactggatgacagacctttcacacagcagggaaaaggacaaaatcaatccggtggtgttttacacctccgccggactgattttgttgttttccctgacaacgatcctgtttcgcgacttctcggccctgtggattggccgcacgctggactgggtttctaaaaccttcggttggtactatctgctggcggcaacgctctatattgtctttgtggtctgtatcgcttgttcgcgttttggttcggtgaagctcgggccagaacaatccaaaccggaattcagcctgctgagttgggcggcgatgctgtttgctgccgggatcggtatcgacctgatgttcttctccgtagccgaaccggtaacgcagtatatgcagccgccggaaggcgcgggacagacgattgaggccgcgcgtcaggcgatggtctggacgctgtttcactacggcttaaccggctggtcgatgtatgcgctgatgggcatggcgctcggatactttagctatcgttataatttgccgctcaccatccgctcggcgctgtacccgatcttcggtaaacggattaacgggccgataggtcactcagtggatattgcagcggtgatcggcactatcttcggtattgccactacgctcggtatcggtgtggtgcagcttaactatggcttgagcgtactgtttgatattcccgattcgatggcggcgaaagcggcactgatcgccttgtcggtgataatcgccacgatctctgtcacctccggtgtcgataagggcattcgcgtgttatcggagcttaatgtcgcgctggcgctgggattgatcctgttcgtattgtttatgggcgacacttcgttcctgcttaatgcactggtgctgaatgttggcgactatgtgaatcgctttatgggcatgacgctcaacagttttgccttcgaccgtccggttgagtggatgaataactggacgctcttcttctgggcatggtgggtggcatggtcgccgtttgtcggcttgttcctggcgcgtatctcgcgtgggcgtaccattcgccagttcgtgctgggcacgttgattattccgtttaccttcacgctgttatggctctcggtgttcggcaatagcgcgctgtatgaaatcatccacggcggcgcggcatttgccgaggaagcgatggtccatccggagcgcggcttctacagcctgctggcgcagtatccggcgtttacctttagcgcctccgtcgccaccattactggcctgctgttttatgtgacctcggcggactccggggcgctggtgctggggaatttcacctcgcagcttaaagatatcaacagcgacgcccccggctggctgcgcgtcttctggtcggtggcgattggcctgctgacgctcggcatgctgatgactaacgggatatccgcgctgcaaaacaccacggtgattatggggctgccgttcagctttgtgatcttcttcgtgatggcggggttgtataaatctctgaaggtagaagattaccgccgtgaaagtgccaaccgcgataccgcaccgcgaccgctggggcttcaggatcgcctgagctggaaaaaacgtctctcgcgcctgatgaattatccgggcacgcgttacactaaacagatgatggagacggtctgttacccggcaatggaagaagtggcgcaggagttgcggttgcgcggcgcgtacgtggagctaaaaagcctgccaccggaagagggacagcagttgggtcatctggatttgttggtgcatatgggcgaagagcaaaactttgtctatcagatttggccgcagcaatattcggtgccgggctttacctaccgcgcacgcagcggtaaatcgacctactaccggctggaaaccttcctgttagaaggcagccagggcaacgacctgatggactacagcaaagagcaggtgatcaccgatattcttgaccagtacgagcggcaccttaactttattcatctccatcgtgaagcgccgggccatagcgtgatgttcccggacgcgtgattgttattgcataaaaccgcgccatgtctgcatatggcgctgtttctcctacctcttgatacgttatatctatacggttaagcccttagtatctattgatgattaccagacaacagataataaaaaagaaaagaactattgcagcccaaaacctacatttgggctgttgcgaatgttcaataagtttagtcttatttaatgtaaatattgctgatcatttgaaatgacgcattattcatgagaaatgtgtatcgtaaatcaactgaaattaacgcaaccatttgttatttaaggtttaattatctgtgtgtgatattttattgaatgttttaaatattgtttttattggcattgctataatattggttatcatttgctgaatggattcagtcttaatgagtgggtttttaagggacaggcatagagtaatgatacgtatgcataaccaacatctttactcattatgtcattgaatgttgacgctatgtgtttatgagggagaggtattttcagttgatctggattgttaaattcatataatgcgcctttgctcatgaatggatgccagtatgtagtgggaaattataaatattgaaatagtccaactacttctttattaccaaaaatgagtatctgaattttaatattgcattcttgcgtgattatctcctgagtttgacttgtgattacctttttaaggtatttagcgtaactgtttttgagcgagcatcagaggtaaagataatcttcttgatagtgatgtgggatgttatacgtatggcatcgctgatgtttatggttaccccttatgtgtgctcaggaatcgacaggtaatcactcatactgaacagcgataaaagataaaggtgtgttcatgaattcatgtgattttcgtgtttttctgcaagagttcggtacaacggttcatttgtcattgcctggtagcgtatccgagaaagaacgactgctactcaagctgctgatgcagggaatgtctgtaacagaaatatcacagtacagaaatcgcagtgcaaagacaatttcacatcaaaagaaacagctctttgagaaactggggattcagagcgatattactttctggcgcgatattttctttcagtacaatccggagatcatatccgccacggggagtaatagtcacagatatattaatgataatcactatcaccatatcgtcacgcctgaagccatcagtctggcgttggaaaaccacgaattcaaaccgtggatccaaccggttttctgcgcgcagactggcgtactgacgggctgtgaggtgcttgtccgctgggaacatccacaaacgggaattatcccaccggatcagtttattcctctggcggagtcatccggtcttattgtcataatgacccgccaactgatgaaacagactgcggatattctgatgccggtaaaacatttgctgccggacaatttccatattggcatcaacgtctcggcgggttgttttttggcagcgggatttgaaaaagagtgtctgaacctggttaataaattaggtaacgataaaatcaagctggttctcgagctaacggaacgtaaccctattccggtaacgccagaagccagagcgatatttgacagccttcatcagcacaacattacctttgcgctggatgactttggtacgggttatgcgacctatcgttacttgcaggcgttcccggtcgattttattaagatcgataagtcatttgtgcaaatggcgagtgtcgacgaaatctccggtcatattgtggacaatattgtcgaactagcgcgtaagcctggtctgagtatcgtggcggaaggggtagaaacccaggagcaggcggatttaatgatcggtaaaggcgttcactttttgcagggctatttgtactctccgccagtaccgggtaataaatttatctctgaatgggtaatgaaagcaggtggttgatgtaaaccgctattcacagcgcatcgggaggttggcagcgattaattctcccgatgcagtaaatcctgatagatccccgttaatatgccatttggcgcaaattgttttttaatccactgcgtcacctgacccgtagcagaatgctgagtcgccagtaacatgcgcgaatcctggcgcggattatggatttgtcgggtaaccagcagggattgcgtcatcgcctcacggaccatgtaatccggcaaaaaaccaattccttcacctaaaatctggcactgacatttggtgttgaaatctggcaccagaattgactcctgcccgtgcagcaaccagcccacttttttattaatcgtatgcgcggtgtcctccaccataatattagggtagagacgcagttggctttcggcgatgggttccggcacaaaggctaacgggtgatccggggcgatagcaaaagcccagcgaatcgcgccaatttcagtgtaatcaataccgccgccgtccagtagtgtatcgggtgcgccgatggcgatattggcctgattattaataatcgcatcccagacgccgttatacacttcggtggtgacggtaatctggcaggtaggaaactgctttttcagcacctgtaacaagcgtgcggtgtgtttgggcgtataaagcagctgattaatacaaatgcgcacacgcgcttctatgccctgcgaaatagtatcgattctgcgtttgatggcataaaaatcattcagcaggtcggtagctttgcggaaaaaataacgcccggactccgttaactcaatgctgcgggtactgcgagtgaacagcaccacatccagccccgtctccatacgcttaatggtgtagctaatggcggaagtggttaaacccaactcttctgcggctttactgaagctgccaaaacgcgcagcggtagtaaatgccaacagattctcttcggtaaaaattgagttcattaaaccattctcgccattatctactatgaatttctccagctatgactgtagaggtatcggttaaagatagataatcatttttgaataacttttaatacccgtcgcgtttagtcgtcgcttcgcttaatttttgtccaccatattctgaaattacccccacgcagttacccgccagaaaacccagtaacgtcaccgtccagttcatcccgctggcaaaaaacagcgtcatgccgagaaagccaccgggaataaaggacagtaaccagaaacgcccttgccagaccactaccgccgagaagggtacggtagtaattacgctcgcccagaacgcggacagtccacttacagaggccagccaaccagcagtcagcgcggcgaaaaacgcccacaccatcccggaataattaaccgccagacttctgataaaccccgatttaccgccgcctgcggcataaaaactgcaaaaggcgacgaagccaatggttcctaataattcccatccttgagagagcccgacatgtgaagacactaactgccaaagccctgcacaaataccgacggtgacacccgttgccgtgagtccgttcatcttgttcccctctggttagacatggacgaaagctactcttacatgtgcagactatagagaaataaaacctgattgagtgaaagggtatcgggtcaaagaaacaaatattgcactaccgcacactgcgaaaagattgttgaatattattcaacaaaaaggcgagatacggcgaattaaatttaagcgggttcttttatcagattatcgttgctattctcaattcatcgaaaacagccacaaaaaccaggggaatgtgaatgagtataaaaaatctacctgccgactatttattggctgcacaacagggtgatatcgataaagtaaaaacctgccttgcgctgggtgtcgatattaatacctgcgatcgtcaggggaaaacggcaattacgctggcaagtttatatcagcaatatgcttgcgttcaggcattaattgatgccggagcggatattaataagcaagatcatacctgtttaaatccttttttaattagctgtctgaacgatgatttaacgctactacgaattattttaccggctaaacccgatcttaattgcgtaacccgttttggcggtgtcggcctgacgcctgcctgtgaaaaaggccatttaagtattgtaaaagagcttttggcgcatacggagattaacgttaaccagaccaaccatgtaggctggacgccgctactggaagcgattgtgcttaatgatggtggtattaaacagcaggcgattgtgcagttattgctggaacacggtgccagcccgcatctgaccgataaatatggcaaaacgccactggaactggcgcgggaacggggctttgaagagattgcgcagttactgattgccgcaggtgcataaaccgggaggcttgctatcaacacaccagaaagacggtgtgtgtgggcgctaactgcggatgcggattttctggcgcagcgggggcaaggacaggttgaacaggtctttgccagagcggtaaatatcgcactcccggctcgccagcagttgctgacgctgctttgtgaagagtacgacaatgcgccaaacagttgtcggttggcactcactcactttgatgatctgttccggcatggtgataaggttcagtttgacgatcaaggtattacggttggtcaacatcttcatatagagatgagtcgttgtcggcgttggctgtccccaaccttgcaaatgaccgctgtgaattttcaccttatcgcctggctacagtggcacgacattattcatcagcacctgggggaaaatgaaaccctgtttaattatcgcggcgataatccgttttatcaggcgttaaataaagaattacatattaaacgacgggcagttattcaggccgtaaacgataaacaaaatatcgcctcagcggtcgccagtatgatggggttagggattggccttacgccatcagccgacgattatttaacaggtctggcgcttattttatttattcccgggcatccggcggaaaaatacaaagaggaattttatctcggtctgcaacgcggcaaaaataataccacattattaagtgccataacgctggaagccgcattacaacaacgctgccgggaaaatattcatcgttttattcacaacattatttatgacatccctgggaacgcaactcaggcaatagaaaaaattaaacatattggctccagttccggctgcgacatgctgtatggcatggccgatggttgtgcgctgagccaaacctacggagggaattatgtcagttaaaatagtcattaaaccgaatacctattttgattctgtctcgctgatgtctatctccacgcgtgcaaataaactcgacggcgtcgagcaggcatttgtggcgatggcgaccgaaatgaataaaggcgtgctgaagaatttaggactgctgacgccggagctggagcaggcgaaaaacggcgacctgatgattgtcatcaatggtaaatcgggtgcggacaacgagcagttactggtggagattgaagaactgttcaacaccaaagcgcaaagcggctcgcacgaggcgcgttacgccactattggcagcgccaaaaagcatatcccggaaagtaacctggcggtgatttcggtcaacggtctgtttgccgctcgcgaagcgcgtcaggcgctgcaaaacgatctcaacgtgatgctgttttccgataacgtctcagttgaagatgaactggcgctcaagcaactggcccacgaaaaagggctgctgatgatggggccagactgtggcacggcgattatcaacggcgcggcgctctgttttggtaacgccgtgcgtcgcggcaacatcggtattgttggcgcatccggcaccggcagtcaggagttgagcgtccgcattcatgaatttggcggcggcgtttcgcaactgattggcaccggcgggcgcgacctgagcgagaaaatcggcggcctgatgatgctcgacgccatcgggatgctggaaaacgatccgcaaactgaaatcattgcgcttatctccaaaccgcctgcgcctgcggtggcccgcaaagtgctggaacgtgcgcgcgcctgccgcaagccggtggtcgtctgcttcctcgatcgtggcgaaacgccagtggatgagcaggggctacagtttgcccgcggcaccaaagaggcagcgctaaaagcggtgatgctctccggcgtgaaacaggaaaatctcgacctgcatacgcttaaccagccgttgattgcggatgtgcgtgcgcgtctgcaaccgcagcagaaatacattcgtggcctgttctgcggcggcacgctgtgcgacgaaaccatgttcgcggtgatggaaaaacatggcgatgtctacagcaacattcagcccgatccggaattccgcctgaaagatatcaaccgcagcatcaaacacaccttcctcgactttggcgatgacgacttcaccaatggcaagccgcacccgatgattgaccccaccaaccgcatcagtcgcttgatcgaagaggcgcgcgatccagaagtggcggtgatcgtgatggattttgtgctcggatttggatcgcatgaagatccggtcggctccaccatcgagacgatcaaagaagcgaaagcgatcgccgctgccgaaggacgcgagttgatcattctcgcctatgtgctgggtaccgatcttgatacgccatcgttagaacaacaaagccagatgctgcttgatgccggagtgattctggcgagcagcagcaccaataccggattgctggcgcgtgaatttatctgcaaaggggaggaagcctgatgagccagtcactgtttagccaaccattgaacgttattaacgtcggcatcgccatgtttagcgatgacctgaaaaagcagcatgtagaagtgactcaactcgactggacgccgccggggcagggcaatatgcaggtggtgcaggcgctggataacattgccgattcgccgctggcggacaaaatcgccgccgctaaccagcaggcgctggagcgtattatccagtcgcatccggtgctgattggttttgatcaggcgattaacgtggtgccgggcatgacggcgaaaaccattcttcacgccgggccgccgatcacctgggaaaaaatgtgcggcgcgatgaaaggcgcggtcaccggagcgctggtgttcgaaggactggcgaaagatctcgacgaggcggctgaactggcggcttccggggagatcaccttctcgccgtgtcacgagcacgactgcgtgggatcgatggcgggtgttacctcggcctcgatgtttatgcacatcgtaaaaaacaaaacctacggcaacatcgcttataccaacatgagcgagcagatggcgaagattttgcgtatgggcgctaacgaccagagcgtgattgaccgcctgaactggatgcgtgatgtgcagggaccaatactgcgcgacgcgatgaaaattatcggcgaaatcgatctgcgcttaatgctggcgcaggcgctgcatatgggcgatgagtgccataaccgcaataacgccgggacgacactgctgattcaggcgctgacgccggggattattcaggcgggttattccgtcgagcaacagcgcgaagtgtttgagtttgtcgccagcagcgactacttctccggcccgacgtggatggcgatgtatcagtcgcgattcacctgcactcgcaacgaggttcatcttatgtcgactcgtaccccttcatcatcttcatcccgcctgatgctgaccatcgggctttgttttttggtcgctctgatggaagggctggatcttcaggcggctggcattgcggcgggtggcatcgcccaggctttcgcactcgataaaatgcaaatgggctggatatttagcgccggaatactcggtttgctacccggcgcgttggttggcggaatgctggcggaccgttatggtcgcaagcgcattttgattggctcagttgcgctgtttggtttgttctcactggcaacggcgattgcctgggatttcccctcactggtctttgcgcggctgatgaccggtgtcgggctgggggcggcgttgccgaatcttatcgccctgacgtctgaagccgcgggtccacgttttcgtgggacggcagtgagcctgatgtattgcggtgttcccattggcgcggcgctggcggcgacactgggtttcgcgggggcaaacttagcatggcaaacggtgttttgggtaggtggtgtggtgccgttgattctggtgccgctattaatgcgctggctgccggagtcggcggttttcgctggcgaaaaacagtctgcgccaccactgcgtgccttatttgcgccagaaacggcaaccgcgacgctgctgctgtggttgtgttatttcttcactctgctggtggtctacatgttgatcaactggctaccgctacttttggtggagcaaggattccagccatcgcaggcggcaggggtgatgtttgccctgcaaatgggggcggcaagcgggacgttaatgttgggcgcattgatggataagctgcgtccagtaaccatgtcgctactgatttatagcggcatgttagcttcgctgctggcgcttggaacggtgtcgtcatttaacggtatgttgctggcgggatttgtcgcggggttgtttgcgacaggtgggcaaagcgttttgtatgccctggcaccgttgttttacagttcgcagatccgcgcaacaggtgtgggaacagccgtggcggtagggcgtctgggggctatgagcggtccgttactggccgggaaaatgctggcattaggcactggcacggtcggcgtaatggccgcttctgcaccgggtattcttgttgctgggttggcggtgtttattttgatgagccggagatcacgaatacagccgtgcgccgatgcctgacgtgccttattaggcaggggcgaaagggacttcaccccaatacacctacggcgtttacaggtatactcgctaaaaattattcagcgggtttggaaacaaagatggcaaaacttaccttacaagagcagttgctcaaagcaggattagtcaccagcaaaaaagcggcgaaggtggagagaacggcgaaaaaatcgcgcgttcaggcgcgtgaagctcgggcggcggtagaagaaaataaaaaggcacagcttgagcgtgataaacagcttagcgaacagcaaaaacaagcggcgttggcgaaagaatataaagctcaggtgaagcagcttattgaaatgaaccgaatcaccattgccaatggcgatattggttttaacttcactgacggcaatctgattaagaagatttttgtcgataagctcacacaggcgcagttgattaatggtcgtctggcgattgcccgcttgttggtcgataacaatagcgaaggtgaatacgccattattcccgccagcgttgccgataaaattgctcagcgcgatgccagcagtatagtgttgcacagcgcgctcagcgccgaagagcaggatgaagacgacccgtatgccgacttcaaagtgcctgatgatttgatgtggtaaacatagataagtcgtgcgcagatgcctgatgcgacgctatgcgcgtcttatcaggcctacggtttatgggcgaagtgtagaccggataaggcgttcacgccgcatccggcagtcgtgcgccatgcctgatgcgacgctttgcgcgtcttatcaggcctacggcttacgggcgaagtgtaggccggataaggcgttcacgccgcatccggcagtcgtgctattatcaacgcatattcagtttattggcgtggtaggcaatatgctcgccaataaaactggagacaaaataatagctgtgatcataaccctcgtgataacggattaacgtcttgatattcatctcctggcagatcttttcaagatttggagtccgcagctgttctgcgtaaaaatcatcactcaacccctgatcaaccatgatttccgcaacgcgttgaccttgtgaaataagactcaccgggtcgtaatccaaccaggcatctttattttcagcaagatatgcagcaaaggcttgctgtccccacggcacttgcgatggggagacaatgggcgaaaacgccgagacgctgacatattcatctgggttacgtaacgccagcaccagcgcgcccagcccgcccatagaatgaccagagatagactttttggccgttgccggaaaatgatgcatcactaaatccggcagctcgttgcggatatagtcatacattttgtaatgttcattccacggcgcttgcgtcgcgttcaggtaaaacccggcaccttgcccgagatcgtaacggtcagcatctgcgacatgactgcctcgcggactggtgtccggcgcaacaacaataatgttgtgctcagccgcgtaacgctgcatccccgatttagtaatgaaattctgctcgttgcaggtcaggcctgaaagccagtacagcaccggcaatttttcattcgcggcttttggtgggagatagacgccgacattcatttcacatttcagtgattgggaataatgccgatacatattttgccagccgccaaagctgacatgtttttcaatgagttccatcagtcattatctcagggttaatcccccggacggctgcccggggagagtattaagaacccccgcctgaagtggacggggtaaacctgcgggaaatcagtaacgaattacggttcgaatggatttgccttcatgcatcaggtcgaaggcgtcattaatttcatccaggctcatggtatgcgtgacaaacggttccagatcgatatcacctttcatcgcatcttcaaccatgcccggtaactgggaacgacctttcacgccgccaaacgcggaacctttccatacgcgaccagtgaccaactggaatggacgggtggagatttcctgaccggcaaccgcgaccccgatgatcaccgactgaccccagccgcggtgcgcactttccagcgccgcacgcatcacgttgacgttaccgatgcattcaaaggtatggtcgataccccatttgttgatatccaacaggacatcttttatcggtttgtcgtagtcattcgggttaatgcagtcggtagcaccgaagcgacgcgccagatcgaatttcttcgggttggtatcgatagcgataatccgacccgctttcgcctgacgcgcgccctgaaccactgccagaccaatcgcgccaagaccaaacacggcaacagaatcacctggctggactttagctgtgttgtgtaccgcgccaataccggtggtcacgccacagcccagcaggcagacgtgttcatggtttgcttctggattaatttttgccagagacacttccgcgactacggtgtattcactgaatgtagagcaccccatgtagtgataaagcggctgcccgttgtaagaaaaacgggtggtgccgtctggcatcaggcctttaccctgggtttcgcgaaccgcaacacagaggttagttttgccagaacgacagaactcacactcgccgcactccgcggtgtaaagcgggatcacatggtcgccaggtttgacgctggttacgccttcaccgacttcaaccacaacgccggccccttcgtgaccgagaaccaccgggaatacaccttccgggtcatcgccggagagggtaaatgcgtcggtatggcaaacgccggtatgggtgactttaattagcacttcaccttttttcggtggtgcaacgtcaatttcaacgatttccagcggtttaccgggagcaaatgcaacggcagcacgtgatttcatctctcgctcttcctcaatatggtaatagattcagctatttaagataggcacgaaccagttcaatagtgtcgtcaacggattggctgacttcgcggctgtagcagtcatttcggtcaaacgtttcccggatatggctttcaagcacttctgccatcagcccattagccgcgccccgaacggcagcgatctgttggagtatggcacggcattcggcatcaccctccagcgaccgttccagagcatcaatctgcccccgaatacgacgaactcgagtaaggacctttttcttctcttccggagtactgggcatttcgcacctcatcatctgcatgcaatatactataggggggtattctatatgtcaatgcatacccccctatagtatataacactggagaataaaatttatccggtgaatgtggtcggaaaacaaagaggaaaggggggggggctaatcggcagggaaggccgccccggatagcgggcggcagaaggaatcagaatttccaggtcagacgggctgcaagttgcagaccgttaaaatcatcggttggggtgtcgtaccacactttacctgccgtcagcccgagattaagttgctcagtcagcggttgaatacgttgcagactgacgctcttcatgctgccgtagcgtgtttctggcgtccagtcataggtgtaagcacctgttccgcggcttagccatagttgcgtataaccagtgccgcgcgggtcattcagacgcacggaaatcatattgctataactaccacctgcatcgctggagtcataatgggtatagcggtagctggtgatcaccgggccagtatagagtgatacgccgccttgccaggcatcgacttcgacatcatcgtaatatttagtgtagcgataaccggtcgtgaaaagcgtttttggtaacagggccaggttaatatcctgacgaaaatcctggcgggcaaagaccggcgtattatccgcaaaggcaatacccgttcgggttgtcagccagttattccatttataccagaccgcaccctgaccgcgagtggcattgaaatgttcagtttcataatcacgacgcccctgggaaagattaaaaagcagcgttgcgttttcaactttcgccaccagttcagcatacgctaaattacggttgccatgatcgccagaataatcggtaaaatcgtagcccgcggtaatggaagttaacccggcataagcgggcaatgcgctaaaaatggccgccgctaataacgtccgttttatcattttaatctcctgtacggataagttcttgtcggagtgaataagttccggtaggtaaattacgttctacaatcacgcgcgggccaagttgcgtgttcggggaaataattcgcccaggcaaaataataacttgtacgccaaggcgtgaacgctgcccgatataacaacctaatttatcgcatccggtagcgataattccctctggagttcgaacagacacgggctgttcatccagacgatgattactggtacgtacttgtgcgcctaaatatgcctggtttgcaactaccgagtcggcaataaaacattgcggaccaatcgttgcttccgcttcaataaccgcatttttaatctcggtggcaaaaccaatttttacgccattgctgattattgtgccaggacgaataaacgcataattactagactggccccctgaatctccagacaaccaatatcacttaaataagtgatagtcttaatactagtttttagactagtcattggagaacagatgattgatgtcttagggccggagaaacgcagacggcgtaccacacaggaaaagatcgcaattgttcagcagagctttgaaccggggatgacggtctccctcgttgcccggcaacatggtgtagcagccagccagttatttctctggcgtaagcaataccaggaaggaagtcttactgctgtcgccgccggagaacaggttgttcctgcctctgaacttgctgccgccatgaagcagattaaagaactccagcgcctgctcggcaagaaaacgatggaaaatgaactcctcaaagaagccgttgaatatggacgggcaaaaaagtggatagcgcacgcgcccttattgcccggggatggggagtaagcttagtcagccgttgtctccgggtgtcgcgtgcgcagttgcacgtcattctcagacgaaccgatgactggatggatggccgccgcagtcgtcacactgatgatacggatgtgcttctccgtatacaccatgttatcggagagctgccaacgtatggttatcgtcgggtatgggcgctgcttcgcagacaggcagaacttgatggtatgcctgcgatcaatgccaaacgtgtttaccggatcatgcgccagaatgcgctgttgcttgagcgaaaacctgctgtaccgccatcgaaacgggcacatacaggcagagtggccgtgaaagaaagcaatcagcgatggtgctctgacgggttcgagttctgctgtgataacggagagagactgcgtgtcacgttcgcgctggactgctgtgatcgtgaggcactgcactgggcggtcactaccggcggcttcaacagtgaaacagtacaggacgtcatgctgggagcggtggaacgccgcttcggcaacgatcttccgtcgtctccagtggagtggctgacggataatggttcatgctaccgggctaatgaaacacgccagttcgcccggatgttgggacttgaaccgaagaacacggcggtgcggagtccggagagtaacggaatagcagagagcttcgtgaaaacgataaagcgtgactacatcagtatcatgcccaaaccagacgggttaacggcagcaaagaaccttgcagaggcgttcgagcattataacgaatggcatccgcatagtgcgctgggttatcgctcgccacgggaatatctgcggcagcgggcttgtaatgggttaagtgataacagatgtctggaaatataggggcaaatccaattacctatcaggcagtttgcgccaatcactaccggaccctgaataacggcaccatgacaaatacgggtattcgcgccgataacaacttcacctgcagtttcatcaataattacctggtctgcaatctgaatatttttctctttaacattaagcttcagatagtttttcagttcctgtgacagaaggttgggaataagcggttgacgcttccaccagtgcggaatagcgggtgggtttgtcgcgctgaggttcgcgtccagtaaaaaaggcaataagtccataaataatccagatggcataagctaataatacatacacaacggaaagcggcgctaaaggcaccaacaaccagcaacgatgaaaccaggcgctaaaagcaccaataacacaaactacgccgacccagataagcggaaacattgccaacaccactccatgcggcccggtggtgatgaattcattaaaccaggtagtgagataaatcccaacgccataaagcacaaccaacagcataggaaatatactgaagataccgaagcggctaaataaaagtcttttatgcaggcgcatacagaccgcgtatcccacaatccaacgccgccagcgacgccactcctcacgcgggctgttgcattcctgtgggtatacgatgcagcgattcgcctgccgaatacggtagccgtttgccaccaatgtccaggtgagatcaaggtcttcgactttagtacgatccgagaaaccgaacttacgcaatacatcagtacggaacatcccgcaggcaccgctgataataaacggtgcgccacccaggagctgctgtagcgtgcgcttcataacaatcatcggcaactttacggtcgcgcggatgtgcggtaacagacccgcgcctttcaacgcagtagagggaatgccgcctacggcatcggcaccgcgctcaatttctgccagcatatagcccattccgtcttgatcgggcggaacataggtgtcggcatcacttaaaaaaacctggtcgcaggtggcgtaattgaggccattcatcagcgcaccacctttaccggtatttttttgcgtgacggcaacaaagcggtcgccccatttgcgtttgacttccgccatgaccgcttcggtattgtccgtggagccgtcgttaacgcaaattacccggcaaaaataagggttacgcagtagattatccagtgactgcgccagacacgggccttcgttatacgcaggtataatggcgtcaatacagcctttcttttgactgggtttacgtcttagcgtacttaaaaaccatagcaacattgctatggacatacagataaatatccaggttttcatgcaatttgctcaaagaatcattttatgaattacaaagccttcacccagatcgctattgacctgttgtccgcgaaattgtgcaactgcacgcaggcgatcatgacgcatataatcgcgtcgttcctagcttttatgtttttttaatgcagcaagtttgactgtgaaatattcttctttaacggattcaaaaacctgaggcataaatgaaagccaggtacttggggtttcgtagccgagaatttgcggaatagttcggcaggcaaccattgaagcttgataaacagcaagatgatcctgatggcggtcggcatcatgcatggtatatacccgcatgatttcaacatcagaaggaatttgatttttaatgatgtcttccagggcggaaatcatatcattgagctgtaaatgagcgcgggtgtcagcaaaattaagatgaatagtttggtggcaccctaatatctttagggcgttgcgcgattcttcatggcgatcgattattccatctgtgccagagttgccggtagtcatcaccacggctgcgatataaattcctttttgcgcaagacgagcaagcgatgcgccacagcctaattctatatcgtcaggatgtgcgccaatagcaaggataccctttcttttatttgccgaagaaaggagggctgaatctaaaaccttatccacttaatgacactccattttatttattatactacaagcacaacgatgcactcagagacgtaatctctggcgcagccagatgttaatttataaatgttaaatgttgctaataactgaaaagcaagggctttcagacccgtgggttcgactgggtaatgtttctatgcaattcatatgttaagtgtttgtatgtttggtatgtatagttattttgttttatacattgtatttagatgtgatttagtttgtcaattaattgcatttaaaaaatatgttctgtgaacaagcattgtttatatacattatgtgaatgtaatatgcgagtgattgagaatgatacagtgatatatacaatgcgaatataatagttttattatatgtattgatattgatagaaataatgaagtaataaatctcgtaatgtggttgtttatgcatcactaaaatgaagtgtagtaattttcccaattgttagaacggagtaattgcatatttaatctttccttagccgtttttttgctaagaataaaatcatctgtgcgataacgactaattcttttaatgaatgtttttattcctgaatactgctcccataacaagacaggggagcagacaatcatggcaatttcatcgcgtaacacacttcttgccgcactggcattcatcgcttttcaggcacaggcggtgaacgtcaccgtggcgtatcaaacctcagccgaaccggcgaaagtggctcaggccgacaacacctttgctaaagaaagcggagcaaccgtggactggcgtaagtttgacagcggagccagcatcgtgcgggcgctggcttcaggcgacgtgcaaatcggcaacctcggttccagcccgttagcggttgcagccagccaacaggtgccgattgaagtcttcttgctggcgtcaaaactgggtaactccgaagcgctggtggtaaagaaaactatcagcaaaccggaagatctgattggcaaacgcatcgccgtaccgtttatctccaccacccactacagcctgctggcggcactgaaacactggggcattaaacccgggcaagtggagattgtgaacctgcagccgcccgcgattatcgctgcctggcagcggggagatattgatggtgcttatgtctgggcaccggcggttaacgccctggaaaaagacggcaaggtgttgaccgattctgaacaggtcgggcagtggggcgcgccaacgctggacgtctgggtggtgcgcaaagattttgccgagaaacatcctgaggtcgtgaaagcgttcgctaaaagcgccatcgatgctcagcaaccgtacattgctaacccagacgtgtggctgaaacagccggaaaacatcagcaaactggcgcgtttaagcggcgtgcctgaaggtgacgttccggggctggtgaaggggaatacctatctgacgccgcagcaacaaacggcagaactgaccggaccggtgaacaaagcgatcatcgacaccgcgcagtttttgaaagagcagggcaaggtcccggctgtagcgaatgattacagccagtacgttacctcgcgcttcgtgcaataaaaggaggcgcagatgctgcaaatctctcatctttacgccgattatggcggcaaaccggcactggaagatatcaacctgacgctggaaagcggcgagctactggtggtgctggggccgtccggctgcggtaaaaccaccctgctgaatctgattgccggttttgtgccttatcagcatggcagcattcaactggcgggtaagcgtattgagggaccgggagcagagcgtggcgtagtttttcagaatgaagggctactaccgtggcgcaatgtacaggacaacgtggcgttcggcctgcaattggcaggtatagagaaaatgcagcgactggaaatcgcgcaccagatgctgaaaaaagtggggctggaaggcgcagaaaaacgctacatctggcagctttccggtggtcaacgtcagcgggtggggattgctcgtgcgctggcggcgaatccccagctgttattactcgacgaaccgtttggtgcgctggacgccttcacccgcgaccagatgcaaaccctgctgctgaaactctggcaggagacgggcaagcaggtgctgttgattacccacgatatagaagaagcggtgtttatggcgactgaactggttctgctttcatccggccctggccgtgtgctggagcggctgccgctcaactttgctcgccgctttgttgcgggagagtcgagccgcagcatcaagtccgatccacaattcatcgccatgcgcgaatatgttttaagccgcgtatttgagcaacgggaggcgttctcatgagtgtgctcattaatgaaaaactgcattcgcggcggctgaaatggcgctggccgctctcgcgtcaggtgaccttaagcattggcacgttagcggttttactcaccgtatggtggacggtggcgacgctgcaactgattagcccgctatttttgccgccgccgcaacaggtactggaaaaactactcaccattgccggaccgcaaggctttatggacgccacgctgtggcagcatctggcagccagtctgacgcgcattatgctggcgctatttgcagcggtgttgttcggtattccggtcgggatcgcgatgggacttagccctacggtacgcggcattctggatccgataatcgagctttatcgtccggtgccgccgctggcttatttgccgctgatggtgatctggtttggtattggtgaaacctcgaagatcttactgatctatttagcgatttttgcaccggtggcgatgtcggcgctggcgggggtgaaaagcgtgcagcaggttcgcattcgtgccgcccagtcgctgggtgccagccgtgcgcaggtgctgtggtttgtcattttgcccggtgcgctgccggaaatcctcaccggattacgtattggtctgggggtgggctggtctacgctggtggcggcggagctgattgccgcgacgcgcggtttaggatttatggttcagtcagcgggtgaatttctcgcaactgacgtggtgctggcggggatcgcggtgattgcgattatcgcctttcttttagaactgggtctgcgcgcgttacagcgccgcctgacgccctggcatggagaagtacaatgagtgaacgtctgagcattaccccgctggggccgtatatcggcgcacaaatttcgggtgccgacctgacgcgcccgttaagcgataatcagtttgaacagctttaccatgcggtgctgcgccatcaggtggtgtttctacgcgatcaagctattacgccgcagcagcaacgcgcgctggcccagcgttttggcgaattgcatattcaccctgtttacccgcatgccgaaggggttgacgagatcatcgtgctggatacccataacgataatccgccagataacgacaactggcataccgatgtgacatttattgaaacgccacccgcaggggcgattctggcagctaaagagttaccttcgaccggcggtgatacgctctggaccagcggtattgcggcctatgaggcgctctctgttcccttccgccagctgctgagtgggctgcgtgcggagcatgatttccgtaaatcgttcccggaatacaaataccgcaaaaccgaggaggaacatcaacgctggcgcgaggcggtcgcgaaaaacccgccgttgctacatccggtggtgcgaacgcatccggtgagcggtaaacaggcgctgtttgtgaatgaaggctttactacgcgaattgttgatgtgagcgagaaagagagcgaagccttgttaagttttttgtttgcccatatcaccaaaccggagtttcaggtgcgctggcgctggcaaccaaatgatattgcgatttgggataaccgcgtgacccagcactatgccaatgccgattacctgccacagcgacggataatgcatcgggcgacgatccttggggataaaccgttttatcgggcggggtaatacgagagtggacggtcccctcgcccccttggggagagggttagggtgagggggcgttcaccgtactttcaacaggttaactccccctttctgagaggaaacaaaattaacgcagaatcttcttctcagccaaatccagcgcaaagtagctgaaaatcagatccgcacccgcacgcttaatcgaacctaagctttcgagcacgactttctcttcatctatagcacccgccagcgcggcgaacttaatcatcgcatactcaccgctcacctgatacgcgccaatcggcaattcagtacgttcacgcagctcacgcacgatgtcgaggtacgctccagcaggtttaaccatcaggcagtctgcgccctgggcttcatccagcagtgattcacgaatcgcctcacgacggttcattgggttcatctgatagcttttgcggtcgccttttaatgcgcttccggcagcttcacggaacgggccataaaaggaggaggcgaacttggtcgaatacgacataatcgccgtatctttaaatcccgcagcgtccagcgcctgacgaatcgcctgtacctggccgtccatcgcggcggaaggggcgatgaagtctgcacctgcagcagctgcaaccacggcttgcttgcctaaattttccagagtcgcgtcgttgtcgacgccatgctcgcacagcacaccgcagtgaccgtgagaagtgtattcacagaagcaggtgtctgacataacgatcatttctggcacggtctgcttgcagatgcgcgacatacgcgccaccagtccatcttcccgccaggcatcgctgccggtttcatcggtatggtgagagatgccaaaagtcatcacggaacgaataccggcgttggcgatgcgttcaatttcgcgtgccagatgtttctctggaatgcgcatcacgcctggcatggcttcaacggctttgtagtcgtcaatttcttcttcaacaaagatcggcaacaccaggtcgttaaggctaagtgttgtctcttcaaacatagcgcgcagcgcaggagatttgcgcaggcgacgagggcgttggattaagtctgtcatggtctgcctgatgtttgtggaatcgaggggcatagtatacctgaagcagggtagggatgttttacgaaagttgtcgcgatgttgacaagaagagaatggaagagaggccaggacatctttttaatagaaacagcaataattttatattcactgaaaatatttttaatctttatttatagctgttggttattattttttggagtttggttgcgctgctataaattgaataattaaaactttgttgcatattcataggatatttatctggtttgtgtttgtgatatttattatgcgtatgcttcaaaaacaaaattatctgcaacatgttgaaatactgtgcttttatgaatttgatgcgtgtttttctccataaattatatatgtccacattcggacttaggggaaagaataattgaaccattcgtctgtaacgcagcataatcgttagcgcgaaacataatatgttttctatgcattgataattgatggatcaacttattacgtccctgaggagggatgacaaatgcactcctggaaaaagaaacttgtagtatcacaattagcattggcttgcactctggctatcacctctcaggctaatgcagcaaactatgatacctggacttatatcgataatcccgttacagcacttgattgggatcatatggataaggcaggcactgtagatggcaactatgtaaactatagtggttttgtctattacaacaacaccaatggtgatttcgatcagtcctttaacggcgataccgttaacggcacgatctcaacctattatttgaaccatgattatgcagacagtactgctaatcagcttgatatcagtaattcagtgattcacggttcgattacttctatgctgcctggcggttattatgatcgttttgatgcagatggtaataatctgggtggatatgatttttacactgatgcggttgttgatacacactggcgtgatggtgatgttttcactttgaacattgctaacactactattgatgatgattatgaagctctttacttcactgattcttataaagatggtgatgtaaccaagcacacaaatgagacatttgatacaagtgaaggcgttgctgttaatcttgatgtagaaagtaacatcaatatttccaataactcccgcgttgcaggtattgcattatctcaaggtaatacttacaacgaaacctacactaccgaatctcatacttgggataacaatatctctgtaaaagattccacagtgacttcgggttcaaattatatcctggatagcaatacttatggcaaaactggtcactttggcaattctgatgaaccgagtgattatgctggcccgggtgatgttgcaatgtcctttactgcttcaggttccgactatgcgatgaagaacaatgtattcctcagcaattcaacgctgatgggtgatgttgcctttaccagcacctggaatagtaattttgatccgaatggtcatgattccaacggtgacggggtgaaagataccaacgggggttggactgatgatagcctcaacgttgatgaactaaatctcactctcgataacggaagcaagtgggttggtcaggcaatttataacgttgctgaaacgtcagcaatgtatgatgttgctacaaacagccttactcctgatgcaacatatgaaaacaatgactggaaacgtgttgttgatgacaaggtcttccagagcggtgtatttaacgtagcgttgaataacggttctgaatgggatactacaggtcgttccatcgttgataccttgacagttaataatggttctcaggttaatgtttcggaatctaaattaacttcagatactatcgatttaactaacggttcttcgctgaacattggtgaagatggctacgttgataccgatcatctgactattaactcctacagtactgttgcgttgaccgaatctactgggtggggggctgattgatcctacccacgtaatatggacacaggcctaagcgaggttcttgttttcaaattgttccggactgaggccgccacaccaactgtgccgccgccaccgattgtaatcacattcgatataattaaacaccgttgcccgcattatttcccggctgataaagtgttctccatggatacattccactttcagcgaatgaaagaagctttccacgcaggcattatcgtagcagcaaccttttgcgctcatacttccacgcagattatgccgcttcagttgcgcctgataatctgctgaacagtactggcctccacggtccgtgtgaacgataacgttccggggcctcttacgccgccacagcgccatctgcagggcatcgcaggccagttgcgccgtcatgcgtggcgacattgaccagccaataacggcacgtgaccacaggtcaatgaccactgccagatacagccagccttcatctgtacgtaagtacgtgatgtctcctgcccacttctggttcgggccactggcgtaaaaatcctgctccaacagattttctgacacaggcaggccgtgtgcgcggtagctgaccgggctgaacttccgggaggcctttgccctcagtccctgacggcgcaggcttgccgccacggtttttacgttaaaggggtaaccctgagcacgcagttcatccgtcaggcgtggggcaccgtaacgctgttttgaccgggtaaaagccgcgaggacaacgctgtcgcagtgttggcggaactgctgacgcgtgcttatccttgtccgccgctgacaccacgtataccagccgctgcgggccacccggagcacgcggcacattgctttgatgctgaactcagcctgatgtttttcaataaagacatacttcatttcaggcgcttcgcgaagtatgtcgcggccttttggaggatagccagctcttcatcccgttctgccagctggcgtttgagacgtgcaatctcggtagacatctccagttcacgttcagaagacgtctgctgattttgctgtttactgcgccagttgtagagttgtgattcatacaggctgagttcacgggctgcggcagtaacaccgatgcgttcagcaagcttcagggcttcactgcgaaattcaggcgaatgctgtttacggggttttttactggttgatactgtttttgtcatgtgagtcacctctgactgagagtttactcacttagccgcgtgtccactattgctgggtaagatcagattacaacctgtacgccaatactatcaccgtaactaacggcggtgtattggatgtgaacgttgatcagttcgatactgaagctttccgtactgacaaactggaactgaccagcggcaacatcgctgaccataacggtaacgtagtatctggtgtgttcgatatccatagcagcgattacgttctgaacgctgatctggtgaacgaccgtacctgggatacttccaagtctaactacggttacggtattgttgctatgaactctgatggtcacctgactatcaacggtaacggcgacgtagacaacggtactgaactggataacagctctgtagacaatgttgttgctgcaaccggtaactacaaagttcgtatcgacaacgcaactggcgctggcgctatcgctgattacaaagataaagaaattatctacgtaaacgacgtcaacagcaacgcgaccttctctgctgctaacaaagctgacctgggtgcatacacctatcaggctgaacagcgcggtaacaccgttgttctgcaacagatggagctgaccgactacgctaacatggcgctgagcatcccgtctgcgaacaccaatatctggaacctggaacaagacaccgttggtactcgtctgaccaactctcgtcatggcctggctgataacggcggcgcatgggtaagctacttcggtggtaacttcaacggcgacaacggcaccatcaactatgatcaggatgttaacggcatcatggtcggtgttgataccaaaattgacggtaacaacgctaagtggatcgtcggtgcggctgcaggcttcgctaaaggtgacatgaatgaccgttctggtcaggtggatcaagacagccagactgcctacatctactcttctgctcacttcgcgaacaacgtctttgttgatggtagcttgagctactctcacttcaacaacgacctgtctgcaaccatgagcaacggtacttacgttgacggtagcaccaactccgacgcttggggcttcggtttgaaagccggttacgacttcaaactgggtgatgctggttacgtgactccttacggcagcgtttctggtctgttccagtctggtgatgactaccagctgagcaacgacatgaaagttgacggtcagtcttacgacagcatgcgttatgaactgggtgtagatgcaggttataccttcacctacagcgaagatcaggctctgactccgtacttcaaactggcttacgtctacgacgactctaacaacgataacgatgtgaacggcgattccatcgataacggtactgaagggtctgcggtacgtgttggtctgggtactcagtttagcttcaccaagaacttcagcgcctataccgatgctaactacctcggtggtggtgacgtagatcaagactggtccgcgaacgtgggtgttaaatatacctggtaatattcttcactccgaagaaatactggtaatttaatctaaataatgcccgtcaaggatttgacgggcattactgcaaaggacgcgcaaatgttatctgtagttaaacctcttcaggaatttggtaagctcgataaatgtttgtccagatacggtacgcgcttcgagtttaataatgaaaagcaagttatattttccagtgatgtcaataacgaagatactttcgttattttagagggagttatctctctgcgtagagaagaaaacgtacttatcggtattacccaggctccttatattatggggctggctgatggtttaatgaaaaacgatataccatacaaattaatatcagaaggaaattgtacgggatatcatctaccagccaaacaaaccattacgcttattgaacaaaatcaactctggcgagacgctttttactggttagcctggcaaaatagaattctggaattacgcgacgtgcagctcattgggcataattcctacgaacaaatccgcgcaacattattatcaatgattgactggaatgaagaattgcgatcacgtattggtgtgatgaattatatccatcaacgtacacgcatatcgcgttctgtcgtcgcagaagttctcgctgctttgcgtaaaggcggctatatcgaaatgaataaaggcaaactggtcgctatcaaccgtttgccttcagagtattaatcaggacgcggggataaccaacggtttattcccgcttagctcggtcaccaggtcattgatgccatcgctcatatttttaaagcgcgtcaacggcgaacgagtgaccaccacaaacgcgccaatattcttctgcgggatcatcgccatataggtaatgaaaccgccaccaccgcctgtcttctgaataatccccggacgaccctctttcggggccatatatacccaacctaaaccaagcgcatccgctttgccggggacatccatgccaatcactttcgtaaactgcgcgcgctgataaatcaacgtctgcatgcgatctgcctggttactgcgctgataaaaatcagatgacaaatactgctgcatccagcgcatcatatcgccaggcgtggaatagacgccgccgctgccaattgccgccagcgtgttattgcacggactggcaccgcgctcagcaaccattaaacggcggcactgatccggtgagggggtgtaggtggtgtctttcatccccaatggacgggtaatctgctcttcaaacaactgggtataaggcttgccggacgcattcgccagtgcatctgccagcaggtcgaacgcaaggttagagtacgccgcctgactgcctggcgcggctttcagcttcgccgtagaaaggtatttccagcgttgctcgcgcgttggccagacaaacaccggacgatgtgccgcgccaccgggctgttcacggggcagggcgctggtatgggttgccagattgaccagcgtaatgggcgtcccattgtaggttggcacgcgtgcgcctggcggagcatatttacttagcggatcgtttaacttcacggtcccctggtcgagcaatttcaccagcatctcactggtcattagcttggtgagggaagcaatacgcacgaccgaatccagctgcgggcgaacgttattaccaggtcgcgtttcgccataactgcgaaagacgcgctggttaccgtcgataacaaccagagccatccccgtggcaccgctgccgtaaaaaatatgatcggcataacgatcgacaatatcagaggcaaactccggttcagtgatcggctgcgccgcatggacggaggtcaatgacgccgcacacagcacggcagaaaaaagcagactacgtttcaacggtggtgtccatagattgaatgaaggtaactgagcgtatttatactactcattgatagattgcaaagggcgaattagtgcaataatagtgttaaaaacgtaacggcgcgtaaacacgatctttttcctgctcaccaatgcctgcatttgtgatcctgcgcgtgttaatccgcttatgtaaacaatctttggtttgtgaaatccgtcgaaacaattcttatggtcaggctggcgaactaagcgccttgctatgggtcacaatgggcggtttcatttggctgacgctttgtagcggtcatgcggttaatacacagcagttgttaaaacgataagaagttagcaggagtgcatatgtttaagtcttttttcccaaagccgggaacgttttttctctcggccttcgtttgggcattgattgccgttatcttctggcaagccggtgggggtgactgggtggcgcgtatcaccggcgcttccgggcagatcccgattagcgccgcgcgtttctggtcgttggatttcctgattttttacgcttactacattgtttgcgtaggactttttgcattgttctggtttatctacagcccgcatcgttggcaatactggtcaatactcggtactgcactgatcatcttcgtcacctggtttttggtggaagtcggggtcgccgtcaacgcctggtatgcgccgttctatgatctgattcaaaccgcgctaagttcgccgcataaagtcaccatcgaacaattttaccgcgaagtgggcgtctttctggggattgcgctgatcgctgtggtgatcagtgtgctgaacaacttctttgtcagtcactacgtgttccgctggcgtacagcgatgaacgaatattacatggcgaactggcaacaactgcgtcatatcgaaggggccgcacagcgtgtgcaggaagacaccatgcgttttgcttcaacgctggagaatatgggcgtcagttttatcaacgccatcatgacgttgatcgccttcctgccggtgctggtaacgctctccgcgcatgtgccggagctgccgattatcgggcacattccgtatggtctggtgattgccgcaatcgtctggtcgctgatggggaccggattgctggcagtggtagggatcaaactgccggggctggagtttaaaaaccagcgtgtagaggctgcctaccgtaaagagctggtttatggtgaagacgatgccacgcgcgcgacgccgcctacggtacgcgagctgtttagcgccgtacggaaaaactatttccgcctctattttcactatatgtatttcaacatcgcccgcattctctatttgcaggtcgataacgttttcggtttgttcttgctgtttccgtcaattgttgccggtacgattacgctcggcctgatgacgcagattaccaacgtttttggtcaggttcgcggtgctttccagtacctgattaactcatggaccacactggttgagttgatgtctatctacaaacgtctgcgcagctttgaacatgagctggatggtgacaaaattcaggaagtaacccataccttgagctaaaaaggagaagtaatgtcgcgcgtcaatcctctatcttcgctgtcattgttggcggttctggttttagcggggtgtagtagtcaggctccgcaaccgttgaaaaagggcgaaaaagcgatagatgtagcgagcgtcgtgcggcagaagatgcctgcgagcgtgaaagaccgcgatgcctgggcgaaagatctcgccaccacctttgaaagtcaggggctggcaccgacgctggaaaacgtctgctcggtgctggcggtggcgcagcaggagtcaaattatcaggcagatccggccgttccgggcttaagcaagatcgcctggcaagagattgaccgtcgtgctgaacggatgcacattcctgcttttctggttcataccgcgctaaaaatcaaatcgccaaacggcaaaagttatagcgaacggttagattcggtgcgtacagaaaagcaattgagcgcgatttttgacgatctgatcaacatggtgccaatggggcagacgctgtttggttcgctcaatccggtgcgcaccggtgggccgatgcaggtcagcattgcttttgccgaacagcataccaaagggtatccgtggaaaatggacggtacagtccgtcaggaagtcttcagtcgccgcggcgggttgtggtttggtacttaccatttactgaattatcccgccagttatagcgcaccgatataccgttttgctgattttaacgctggctggtacgccagccgtaatgccgcgtttcagaacgcggtcagtaaggccagcggcgtgaagctggcactggacggtgatttaattcgttacgacagtaaagaacccgggaaaaccgaactggcaacgcgcaaactggctgcaaaactggggatgagcgacagcgaaattcgccgtcagttagagaaaggtgacagcttctcttttgaggagacggcgctgtacaagaaagtttatcaacttgccgaaacgaaaacgggtaaatcactcccccgcgaaatgttgcctggcattcaactggaaagcccgaaaatcacccgcaacctgactacggcctggtttgcgaagcgcgtagacgaacggcgggcgcgttgtatgaaacagtgatcaaacaggaatgtcaggccagataaggcgtttcaggccgcatctgacaatgtaaaacttactggcggcgatgtcgccagtgcagccatagcgccaccactgcaaaaatgaggcagcctactaaaaacgggatcagcccgaaaatggtgccgacacctaaaccaatttccacccgtgggcgacctgtttcctggacctgcattaaacgctcatagacgccgggcgcatgcactaacaggttcagcaattgcgccccagcccaaaagcaaaacagcacaaacaacgcataggcaatgttgccaggcgttgaagaggcattgcgatattttccgctaaacagcgattttgacagggtgaaatcagccataaaaacctccggaagtcatctgcttctcttctggtgtgataccagcggcttatggcaagtctgacaggtcatttagattgtcaatatcagaatcatggtaaattgatgttgggaatattcccgaagcgtgaatcttcgttgtgagtcacaaaatggcaaccttaagttaaatttattaacaattacgaaaatgttgtctacaccacagacggttgttgcagaatatgcaaggatgttgtttttcgttaacggagctgccatgaatctgcctgtaaaaatccgccgtgactggcactactatgcgttcgccattggccttatattcattcttaatggcgtggtggggttactgggatttgaagcaaaaggttggcagacctatgccgtcggtctggtgacgtgggtgattagtttctggctggcggggttgattattcgtcgtcgcgatgaagaaactgaaaacgcccaataagaatattatcgggcgttaaaatattacattgtggttttcaatgcgttatccgcagcgtgacgctccagcgccagttcaatcaaacgtgtgatcagatcggtgtaacccagaccgctggcttgccacagcttcggatacatactgatattagtgaagccaggcagggtgttgatctcgttgatcaccacttcgttctctggggttaaaaacacgtctacacgcgccatgcctgcgcatcccaacgtttgataagcctgaacggcaatcgcccggatcttatcgttgatttctggcgcaatggctgccggaactaccactttcgcgccatcttcgtcaatgtacttggtgtcgtaggcatagaaatcgctggtgagtacgatctctccacaggtgctggcttgcggattgtcgttgcccagaactgcgcattcgatctcacgacctttgatcccttgctcaacgatcactttatgatcgaactcgaacgccagatcgacggcaattgcgtactgttcttcactggttactttgctgacaccaacagaagagccctgattagccggttttacaaacagtggtaaccccagtttagactccacttcggcaaaactaatgttgtgacgattggcgcgcgtcagggtaataaatggcgcaatgttcagcccggcatcgcgtagcagacgtttggtgacatctttgtccatacaggctgctgaagccagaacatcagaacctacaaacggtaaattggcgacccgcagcattccctgcaaggaaccatcttcgcccagcgtaccgtggacaatcgggaaaatgacatccaccgtcggcaacggctgaccgttttgcgcgtcgataagctgatgctcatgtttacctggcacctgcgcaaggctggtcgccgaagggcgcaacgcaatatgggcaggatcgtctgcatttagcagataattgctggcatcgctgacgtgccattgcccttgtttatcaatgcccagcagcacaacgtcgaagcgacttttatcaatggcatcgacaatgttttttgccgattgcagagacacttcatgttccgctgatttaccaccaaaaacgattcctacccgcagtttttccatcttaaaaacctatcccgtctaacacaaagtgcatacattaccacgacaaaacgggggattcgcggccttctgaaagattgttgcaatcttctgctgacaaagcgtgcaacgtactggtgaagaaagtgcgttatctcaaagatgtgcgcaagatcacaaaaatgatgaacgggaagctaatttattcctggcttaaatggccatgcggtgagtttttttctcttaattataagttaacgaagagaatatatttcataacttttatttataataaaggttgataattaaaagcctatattttgtgtgggtaattatttaaataagagaaacgtttcgctggtaatcaaacaaaaaatatttgcgcaaagtatttcctttgtcataaaaataatacttccagacactatgaagttgtgaaacataatgttaacttctccatactttggataaggaaatacagacatgaaaaatctcattgctgagttgttatttaagcttgcccaaaaagaagaagagtcgaaagaactgtgtgcgcaggtagaagctttggagattatcgtcactgcaatgcttcgcaatatggcgcaaaatgaccaacagcggttgattgatcaggtagagggggcgctgtacgaggtaaagcccgatgccagcattcctgacgacgatacggagctgctgcgcgattacgtaaagaagttattgaagcatcctcgtcagtaaaaagttaatcttttcaacagctgtcataaagttgtcacggccgagacttatagtcgctttgtttttattttttaatgtatttgtacatggagaaaataaagtgaaacaaagcactattgcactggcactcttaccgttactgtttacccctgtgacaaaagcccggacaccagaaatgcctgttctggaaaaccgggctgctcagggcgatattactgcacccggcggtgctcgccgtttaacgggtgatcagactgccgctctgcgtgattctcttagcgataaacctgcaaaaaatattattttgctgattggcgatgggatgggggactcggaaattactgccgcacgtaattatgccgaaggtgcgggcggcttttttaaaggtatagatgccttaccgcttaccgggcaatacactcactatgcgctgaataaaaaaaccggcaaaccggactacgtcaccgactcggctgcatcagcaaccgcctggtcaaccggtgtcaaaacctataacggcgcgctgggcgtcgatattcacgaaaaagatcacccaacgattctggaaatggcaaaagccgcaggtctggcgaccggtaacgtttctaccgcagagttgcaggatgccacgcccgctgcgctggtggcacatgtgacctcgcgcaaatgctacggtccgagcgcgaccagtgaaaaatgtccgggtaacgctctggaaaaaggcggaaaaggatcgattaccgaacagctgcttaacgctcgtgccgacgttacgcttggcggcggcgcaaaaacctttgctgaaacggcaaccgctggtgaatggcagggaaaaacgctgcgtgaacaggcacaggcgcgtggttatcagttggtgagcgatgctgcctcactgaattcggtgacggaagcgaatcagcaaaaacccctgcttggcctgtttgctgacggcaatatgccagtgcgctggctaggaccgaaagcaacgtaccatggcaatatcgataagcccgcagtcacctgtacgccaaatccgcaacgtaatgacagtgtaccaaccctggcgcagatgaccgacaaagccattgaattgttgagtaaaaatgagaaaggctttttcctgcaagttgaaggtgcgtcaatcgataaacaggatcatgctgcgaatccttgtgggcaaattggcgagacggtcgatctcgatgaagccgtacaacgggcgctggaattcgctaaaaaggagggtaacacgctggtcatagtcaccgctgatcacgcccacgccagccagattgttgcgccggataccaaagctccgggcctcacccaggcgctaaataccaaagatggcgcagtgatggtgatgagttacgggaactccgaagaggattcacaagaacataccggcagtcagttgcgtattgcggcgtatggcccgcatgccgccaatgttgttggactgaccgaccagaccgatctcttctacaccatgaaagccgctctggggctgaaataaaaccgcgcccggcagtgaattttcgctgccgggtggtttttttgctgttagcaaccagacttaatggcagatcacgggcgcatacgctcatggttaaaacatgaagagggatggtgctatgaaaataacattactggttaccttgcttttcggtctggtttttttaaccaccgtcggcgctgccgagagaactttaaccccacaacaacagcgtatgacctcctgtaatcagcaggcgacggcgcaggcgttgaaaggggatgctcgtaagacctacatgagtgattgcctgaagaacagcaagtctgcgcctggcgaaaaaagtttgacgccacagcagcaaaagatgcgcgaatgcaataatcaagcaacacaacaatctctgaaaggtgatgatcgtaataagtttatgagtgcctgcctcaagaaagccgcctgatacctgatagtgctaacgggtgagctacgaaaatggctcacccgaaatatcatacttctgcctttagctccgtctctataatttgggaaaattgtttctgaatgttcccaaaaataatgaatgatgaaaactttttcaaaaaagcggcggcgcacggggaggaacctcctttaactcctcaaaacgaacatcagcggtccgggctgcgcttcgcccgtcgcgtcagactaccccgtgcggttggcctggctggcatgttcttaccgattgcttcaacgctggtttcacacccgccgccgggctggtggtggctggtgttggtcggctgggcgttcgtctggccgcatttagcctggcagatagcgagcagggccgtcgatccgcttagccgggaaatttacaacttaaaaaccgatgcagtattagcgggaatgtgggtaggcgtaatgggcgtaaacgtgctgccttccaccgcgatgttgatgattatgtgtctgaatttgatgggggcaggcggcccccgtctgtttgtcgcgggtctggtgttgatggtggtttcctgccttgtcaccctcgagctgacgggcattaccgtgtcgttcaatagtgcgccgctggaatggtggctctcccttcccattattgtcatttatcctctgctgtttggctgggtcagctaccagacggcaaccaaactggcggaacataaacgcaggttgcaggtcatgagtacccgcgacggcatgacgggcgtgtataaccgacgtcattgggaaactatgttacgcaatgaatttgataactgtcggcggcataatcgcgatgcaacgttactgattatcgatatcgaccatttcaagagcatcaacgatacctggggccatgatgtgggcgatgaagcgattgtggcgcttacccgacagttacaaattaccctgcgcggtagcgatgtgattggtcggtttggcggcgatgagtttgcagtaatcatgtccggtacgccagctgagagcgccattaccgccatgttacgggtgcatgaagggctaaatacattacgtttgccgaatacgccacaggtaactttacggattagtgtgggggttgcgccgctgaacccacaaatgagtcactatcgtgagtggttgaaatcggcagatttggcgctttacaaagcaaagaaagccggacgtaaccgcaccgaagtggcggcctgacgtccggcgaaagtcatcaggatttgctgagtttttctgatttttccatacacttcgtcatcgcttcgatcactgcagcacggaagcctttctcttccagtacgcgtaccgcttcaatggtggtgcctcccggtgagcagaccatatctttcagtgcccccggatgttctcccgtttccagcaccatttttgcggaacccattaccgcctgagcggcaaatttatacgcctgggcgcgtggcatcccgcccagcacggcggcgtcggccatcgcttcgataaacataaatacgtaggctggcgaagaaccgctcacaccgaccaccgggtggatcatcggctcagcaattacttccgcttcgccaaagcagcggaaaatattcagcacatcagcggtatcttctggggttaccagcgcgtttggcgttacggaggtcatcccggcattaaccagtgcgggagtgttcggcatggcgcggataattttccggtcatggcccagcgcgcgggcaagctggtcgagcgtgacacctgcagcaatagaaacgaccagagagtctttattcaggctggaggtgatttcgctaagcactttaatcatgatgccaggtttaacggcagcaaaaatgatgtcggcgatttgcgccacttcttgcgccgattctgcggcgttgatgccgaactggtcatgcagggcggcgactttatccggggagggggtgtatacccagatttgccctggaagcacctgaccgctggcaatcagaccgccgagaatggcttttcccatattgccgcagccaataaaaccgattttcttttccattgcctcactcctgccgtgaaattcattgttttgataatcgctggcagaagcataaacagaactatgccggaaggcaaaagcgcgacacaatagaggattacccaacaaaggatgactttatgacaatttgggtggatgccgacgcgtgtcccaatgtaattaaagagattttgtatcgcgcggcggaacgtatgcagatgccgctggtactggtagcaaaccagagtttacgcgtgccgccatcgcgatttattcgtacgctgcgcgtcgcggcaggtttcgacgttgccgataacgaaattgtccggcagtgtgaagcgggcgatttggtgatcaccgcagatatacctttggctgctgaagccatcgagaaaggcgctgcggcgcttaatccgcgcggcgaacgttacacgccagcgaccattcgtgagcgcctgacgatgcgcgattttatggataccttacgtgccagtgggatccagaccggcggaccagatagcctttcacaacgtgaccgccaggcctttgccgcggagctggagaagtggtggctggaagtgcaacgtagtcgtggctaaatgtaatttattatttacacttcattcttgaatatttattggtatagtaaggggtgtattgagattttcactttaagtggaattttttctttacaatcgaaattgtactagtttgatggtatgatcgctattctcatgacaccggctttcgccgcattgcgacctattggggaaaacccacgatgacacaacctctttttctgatcgggcctcggggctgtggtaaaacaacggtcggaatggcccttgccgattcgcttaaccgtcggtttgtcgataccgatcagtggttgcaatcacagctcaatatgacggtcgcggagatcgtcgaaagggaagagtgggcgggatttcgcgccagagaaacggcggcgctggaagcggtaactgcgccatccaccgttatcgctacaggcggcggcattattctgacggaatttaatcgtcacttcatgcaaaataacgggatcgtggtttatttgtgtgcgccagtatcagtcctggttaaccgactgcaagctgcaccggaagaagatttacggccaaccttaacgggaaaaccgctgagcgaagaagttcaggaagtgctggaagaacgcgatgcgctatatcgcgaagttgcgcatattatcatcgacgcaacaaacgaacccagccaggtgatttctgaaattcgcagcgccctggcacagacgatcaattgttgattttcgagcgcctatacttaacgttcatcccgtgaaataaggaagaacgatgccaacgaaaccgccttatcctcgtgaagcatatatagtgacgattgaaaaaggaaagccaggacagacggtaacctggtaccaactcagagccgatcatcctaaaccagactcgttgatcagtgaacatccgaccgctcaggaagcgatggatgcgaaaaaacgctatgaggaccctgacaaagagtgaccgcatcagactgctcggaagggattctgagtgccactacaagggatctgcgtcacatttttcataattcatgtttttctaataattagaatattaaacaataacaatccattactggaatcatttggaatctttacattatgccgtgcacgtctgctgctacgctttttgtcatttgtagcacaagtaagtgtcagcagtggtgcttcacacttgcccggtaattaacgacgaaagaaaagtaaggtggatgaacaatgagtgcgtcgttggcgatcctgaccatcggcattgtacctatgcaggaagttttgccgctcctgacggaatacattgacgaagataatatttcccatcatagcctgctggggaagttaagtcgtgaagaagtgatggcggagtacgcgccagaagcaggcgaagacaccattctcacattattaaatgacaaccagctggcccatgtttcgcgtcgcaaagtggagcgtgacctgcaaggtgtggttgaagtgctcgataatcagggttatgacgtcattttattaatgagtacagcaaacattagtagtatgactgcgcgtaatacgatctttcttgagccgtcgcgaatattgcctccactggtttcctctattgttgaagatcatcaggtgggggttatcgttccggttgaggagatgctgcccgttcaggcgcaaaaatggcaaattttgcagaaatcgccggtattttcattgggtaaccccattcatgattcagaacaaaaaatcattgatgccgggaaagaattactggcaaaaggggctgatgtcatcatgctggattgtttaggatttcaccaacgtcatcgcgatttactgcaaaaacagctcgatgttcctgtcttgctgtctaacgtattgattgcacggctggctgcggaattactggtgtaattttgcgtgacagccagcgcctctggcccctatagtgaagtagatgttcaactaccaaacagggccagtttatgcttcaaagtaatgagtacttttccggcaaagtgaaatcaatcggcttttccagcagcagcactggtcgcgccagcgtgggtgttatggttgaaggcgaatacaccttcagcaccgctgagccggaagagatgacggtaatcagtggcgcgctgaatgtgttactgcctgacgcgaccgactggcaggtgtatgaagccggttcggtgtttaatgttcccggtcacagtgagtttcatctgcaagttgccgaacccacctcttatctgtgccgctatctgtaattcctcgccttccccttgaacgggagggcatttttctgaaatatcctttctttagcccataataatatttcctttgctgcgattttttcaatttccgatatattcataatttatcaaggttgatataaatatcagtgaagatctccagatattgttgcggaactggctacgataaaagataaatcagatgatgaatggtggcgtgcattgctgcaaagtcgcaatgatcatttacgccaaacggcattgcgcaacgcacataccccggcgttgttgttaacgacattgactgagcctcaggatcggtcgctggctattaataatccacagctggctgccgatgtgaaaacggcgtggttaaaagaggatccatcattactcttatttgtcgaacaacccgatctttcgctgttacgtgatttagtgaaaaccggggcaacgcggaaaattcgcagtgaagcgcgtcaccggcttgaggaaaaacaatgacacaacgtccatggagcaagttacagcgtaaaacgcataatattgctgcgctaaaaattattgctcgccgtagcgaataattatatgcctggtgtggcttcgtacgccggataagacgcggcaggcgtcgcatccggcattaaaggaaaatcagcaattaacgttgtgcttcgccacctaatccttcaatcaggttttgaattaacgctgccagttcaccagtcatcaggatgaaatcggcatcaaaacgctgggcgaaatcttcacggtcgatatcttcgttttgatcgcgcagctcgtcgcagaacttcagacgcttgagcgaaccatcgtcgcacatcacaaactgaatgcgctgctgccagtcgagcgccagtttagtcaccacttttccggcttcaatgtgattggtgatctcttcgctggtcagatcttgtttcttcgcgcggatcacgccgccatcttccagcaacgatttcagctcggcttcatcaagcagctggaagccctgtgccgcactaccggagcgaacccattcggtcagcgtcagttcaatcgggttttccatgctcaatggtacaaccggtaacgaccccaggcttttacgcagtaatgccagcgtatcttccgcttttttggcactggcgcagtccaccataatcaaaccgttaaccgtgtcgatccacatcattgtctggctaaaacggctgaaagcacgcggcagcagagagtgcagcacttcgtctttcagcgaatctttttcggttttcttcagcttacgcgcctgttccgcttccagtttggcgattttcgcttccagcgcctgtttaatcaccggagacgggaggattttttcttctttgcgcgcgcagataacaatttgaccattggcaacgtgcgttaacgcatcgctgtgcgatcccatcggaggaacccagcccatcttcgccatgtcctggctgccgcatggggtaaatgccatcgaggctagctgtttttccatctcttctgcacgcagcgaaatctcgcggctaagacggtaaaccattaaatttttgaaccacagcatgataatttccacggccttgtcgttaaatttagcgggcatgataacgaattgtcggcggccttgcattgccaatccggttgtccgtctctacgctattgatattgaaaaaaataaggagagtaccgtgcgtataggtatcgatttaggcggcaccaaaactgaagtgattgcactgggcgatgcaggggagcagttgtaccgccatcgtctgcccacgccgcgtgatgattaccggcagactattgaaacgatcgccacgttggttgatatggcggagcaggcgacggggcagcgcggaacggtaggtatgggcattcctggctcaatttcgccttacaccggtgtggtgaagaatgccaattcaacctggctcaacggtcagccattcgataaagacttaagcgcgaggttgcagcgggaagtgcggctggcaaatgacgctaactgtctggcggtttcagaagcagtagatggcgcggcagcgggagcgcagacggtatttgccgtgattatcggcacgggatgcggcgcgggcgtggcattcaatgggcgggcgcatatcggcggcaatggcacggcaggtgagtggggacacaatccgctaccgtggatggacgaagacgaactgcgttatcgcgaggaagtcccttgttattgcggtaaacaaggttgtattgaaacctttatttcgggcacgggattcgcgatggattatcgtcgtttgagcggacatgcgctgaaaggcagtgaaattatccgcctggttgaagaaagcgatccggtagcggaactggcattgcgtcgctacgagctgcggctggcaaaatcgctggcacatgtcgtgaatattctcgatccggatgtgattgtcctggggggcgggatgagcaatgtagaccgtttatatcaaacggttgggcagttgattaaacaatttgtcttcggcggcgaatgtgaaacgccggtgcgtaaggcgaagcacggtgattccagcggcgtacgcggcgctgcgtggttatggccacaagagtaaaaaacgtaggcaattggcgcatcatgcctgatgcgacgcttgccgcgtcttatcaggcctacaaaaggtgccagaaccgtaggccggataaggcgttcacgccgcatccggcaataagtgctccgatgcctgatgcgacgcttgccgcgtcttatcaggcctgcaaaatgtgccagaaccgcgtagggcggataaggcgttcacgccgcatccggcaataagtaatgagcaccgagactataacctaccccagtggtttcgccagcaccggagtatccgccgcttgctggcgcttatagcgaccatacagcagcaacgacgacatcgcagcaaacgaaagcagggcggcaggcagcgccacgtaattatatgccagccccagcgtcagcatcatacctccgcaatatgcgccgacggcgctaccgaggttaaacgctatttgcccacctgcggcacctaataactctccgcctttggcgttttgtagtaacaatatttgtagcggtgctgaaagggcaaataatcccgcgcaacaaataaaagcaaaaataagcgacgttgttttcatgccgccgcagaaaaagagcatcagcagtgccagtacaattataaagtcagtcactgctgcaatgcgcagtggtgaataacgtcctgaaatcctgccacttagcatatttcccagcaccatccctagcccaactaacatcataataaaggtcatcgccgtttccgaaaaaccggaaataaacatcatgtatggctttacgtagctgaaccaggcaaacacacctgcgttgccaaacatcgtggcggcgaaaattaaccacggggccgggctgcgcaaaaagtgaaattgttcgcgcagatttcctttcgcctcgtcgcgaatatctggcacccaaaaatagaccgatgccatcaccgcaatattaaaaacagcgatcaataaaaaggtgtaacgccagctaaattcctgacttaaatacgttcccagcggaatgcccagcaaattggcgactgtcatcccggaaaccatccccgccacggcggcggtgacttttccgggtttgataatttttgataacacgatcgctccgacgccaaaaaatgcgccatgcggaaagccggataccagccgaccaatggcgagcatcaggtaagacgaagagagcgtgaacatggcgttgccaatgacgcacaacgccaccagaaacaacaagatatgtttgagtgagtagcggctggaaaagagtgcgatgattggcgcaccgaccaccacccccagtgcataatacgagatcatatgcccggcggcaggaatcgaaattcctacgttatgcgccagctccgtgagcacgcccataatgccaaattcggccatccccaaaccaaacgtgcccagagccaaagataaaatgacttttttcataccaccatcacaaccaccagaacggctaccaatcaccgtagccaataaagtgatagcttgcaggataacgaccagcaaggccaagagataattcgcccctctgtattcattatcctgctgaatagttatttcactgcaaacgtactttccagtttgctgtagcccaggccgttgatctttttcactttgatctgcaccggaatacgctctttcatcgcttctacgtggctaatcacaccgatggttttgccactggcgttcagggcatccagcgcatcaagggcggtatccagcgtttcgctatccagcgtgccaaaaccttcatcaaggaacagcgagtcaatacgtgttttatggctgaccagatccgaaagcgccagcgccagcgccagactaacgaggaaactttcgccgccggaaagggtacgggtatcgcgtaccgcatctgcctgccaggtatcaacaacctcgacttccagcgcctcgctggctttgcgctgtaacagatagcgcccgtgcagccgggtaagttgctgattagcgagatggactaaattatccagcgtcagcccctgggcaaacttgcggaatttatcgccctctttggaacctattagcgaattcagatatccccagtcctcaacctgctgcgtcatttgagcaatttgctgcattaaggtttgttgttgctgacggttatctgcatcctgcttcagctgctggcgaatctcgccttgactcgtggtgttttcacgcaacttttggtgagtttgcgctaactcttgctgaatctgctccaccgtcacagtgagagccaacccgtcgtcaggtcggtgttgttgatgctgtgccagcgtttctgctgtctgagtgaccagagtttgcgcctgacggcgctggttttccagattctgcttgagctgttccagctgcgttagtgtttgttcatccattagcgccgcaaggaacgcctgctgatcgtcaaagacgctggcctgtagcgcggtgtcaaactgcgcctgggctttttgcagactttgcgccgccagaacatcctgttgctgtaacgtctgctgctggctgtgtaatgcgagacattgttcatgtacctgccgccagttttccaataccacagtttcttcgcagtgcgggagttcatcactttgcggcaacgtttccagaatcggcgtcagctgctgaatacggttttgcagcgcggttaattcgttctggcgttgctgccagctctgcgcttcttgctgacgtgtcgccaaccagctctcttcttcatcttcctgtggcaatgtcagtgcataacccgtcaatgtcgttaaaagtagttgctggcgttgttcaatttgctgttgatactggataatttgctgattatgcgcggcaatctgcccttgtaattcatgccgttggctgagtaaccgcagctggcgttcgtgctcatcttgtgcatccagccacggttgaatatcgtccagtggctgcaaggtgatattgaggctggccgtgacggcttgccattgttgagtaagtgcttgctcatcttgtcggaggctttgcgcttcgttttcatcacgctgaagctgctttgttatggcgtccagttgcccacgtagcgtcgcaccttcttcaccgagctttttaacttcgttttccagcgccagtaatcgagactgattaacgccaggctccagcgcctgatacgcctcgaccgccgggtggctggtggaaccacaaagtgggcaaggctgacccgcctgtaactgtgcacgttgagcttccagcgttttgatgcgcgcttcctgctcgcaaatggttttcacatcggcaagttgctgcgtcttttctttataacgctggcgcatttcgttaagtgcggcgttacgttgcgtctgttcttgcgtgacattctggatagcgacctgtaactgcgccagacgtttttgttggggaacaatctgtccatgcagcgcgaccaggtgctgacgcagtgggcgttgctcagcatgttgcgccagggcggtagcaacttcatcggcggttaacgtcaacgtgatcgccgcaagcgcattaagtttttgctcagcatgggttaactgttgctgccattgccgcagatgctcgcgatcgctggtttgttgggagaactgcgcacgccaacccgccggttcgttgttccactgacggaagcggtcgtgttcctgtaaccaggtattcaggctttgttgctgctgctgtaattctgctgactgcttcgccgcgtggtggcgaatgctcgcgcgaagcgccattgtgctctgtaagcgagtatttacttcttcaatctgctggcgaatatgcgccagcgccgcgctgtgttctgcgatgcgttcccagtgtggacgaagatttcgtgccggttgtgccagactaagcgccgccagttgaggttgcgctttttcttcttcggctaacgcctgttgcaaggcctgctgacggcggctggcttcttgctgcaattcgtcctgacgcgttaaccagtttagcgattgttgttcttgctgctgcgcggtaattaactgtttttcttcgtcagtaagtacctgcaaactcgctgtcagcgattgcacttgttccggcgtgagcaacgtgacgccgctggcctgcgcttgcagcttctccagctctgtgcgggccgatttgtgctgctcaaaaaccatcgccgagatttgcccgtagatttcagtgccggttaactcctcgagcaattccgcgcgttctttgggtttggcattcaggaaggcagcaaattgcccctgcgaaagcagcatcgaacgggtgaagcgcccgtaatccagcccggttaacgtcgctgtcagttccagcttatctttcactttgtcggcgagaattttgccgtcggcgcagcgcgccagctctacgcgtggcacctgcaaattaccgtcgggttggttacgcgcccgattctggctccagaatgcacggtacgcttcacctttcacttcaaactccacctccgccagacattcggcggtatcgcgggtcatgagatcattttgcgattgtgaaacgttagagagacgcggagtttcgtgatacagcgccagacaaatggcgtccagcagggtggttttccccgcacctgttgggccggtaatagcaaacagcccgttgctggcgaacggctcgcgggtgaaatcaatcttccattcgccttttaatgagttcaggtttttcaggcgcaggctgagaattttcatgcttcgtgttctccggcgagggtatgcaacgtcgtggtgaaaagatgctgcagacgttgctgctgcgattcatccagttcttccagtgccagacggcgattgaacacctcttcgacgctgagttcgctgagggtttcacgctgttggctggctaacacacgctcgcgctgttcacgactccgacgtaccagcaatacttcgacaggcaatgattcggttaatgcctggattttgcgctgaatatcatgcagatactcatcagtagtgatttcgatatccagccagacaggtggctcctgcgatacatcgcgccactgttccagctgtgcggtaatcgacgccagatcgcctttcagcactgccatgggttgcgttaccggtacgttcaggttttccacgctctctaatttgccgtttgaaaatgtcaccagatggacatatttactcttaccgcattcatcaaaactcagtggaatgggggagccgcaatagcgaacatgttccatgccgccaataatctgtgcgcggtgaatatgcccgagcgcgatgtagtcggctggtggaaagttttgtgccggaaacgcgtccagcgtgccaatataaatgtcacgcacggcgtcacttttactggcccccacggtcgttaaatgtcccgtggcgatgatgggcagaggctgatcgccgcgcagtttgcaggcatcggcatagtgttgttggtaataatcggtaatcgctgccagtaaatgctgctgtttttcaataccgttaagccccgcctggctggtaataatgtcacgcggacgtaaaaacggaatggggcacagcactgcgcctggcgtcccgtcgcgacgaggcaagatttgcggcgcatgtccggcgctggcgaccacggtagtattgaggaacgccatgatatcgcgcgattcattcagcgtggcgaccgagtcatggtttcctgccagtaccaccagatgacagccagtttgctgtaaattgacaacaaaacggttgtataacgtgcgggcgtaactgggcggcgagccggtatcgaaaacatcaccggcaacaataatcgcatccacctgatgggtttgtgctgtctccagcagccagtcaagaaaagcctgatgttcagcttcgcggcttttactgtagaagttctggccgagatgccagtctgaggtgtgaaggatgcgcataacggttccctggcgaaaaagcatgggcgcgattatacccaaacagatgtgccatttgcttttttctgcgccacggaaatcaataacctgaagatatgtgcgacgagcttttcataaatctgtcataaatctgacgcataatgacgtcgcattaatgatcgcaacctatttattacaacagggcaaatcatggcgagacgtattctggtcgtagaagatgaagctccaattcgcgaaatggtctgcttcgtgctcgaacaaaatggctttcagccggtcgaagcggaagattatgacagtgctgtgaatcaactgaatgaaccctggccggatttaattctcctcgactggatgttacctggcggctccggtatccagttcatcaaacacctcaagcgcgagtcgatgacccgggatattccagtggtgatgttgaccgccagaggggaagaagaagatcgcgtgcgcggccttgaaaccggcgcggatgactatatcaccaagccgttttcgccgaaggagctggtggcgcgaatcaaagcggtaatgcgccgtatttcgccaatggcggtggaagaggtgattgagatgcagggattaagtctcgacccgacatctcaccgagtgatggcgggcgaagagccgctggagatggggccgacagaatttaaactgctgcacttttttatgacgcatcctgagcgcgtgtacagccgcgagcagctgttaaaccacgtctggggaactaacgtgtatgtggaagaccgcacggtcgatgtccacattcgtcgcctgcgtaaagcactggagcccggcgggcatgaccgcatggtgcagaccgtgcgcggtacaggatatcgtttttcaacccgcttttaacgccttgctcatcggacgcagagcagggcttatgatttcttaactggagtatcttacgtgctggaacggctgtcgtggaaaaggctggtgctggagctgctactttgctgcctcccggctttcatcctgggtgcattttttggttacctgccctggtttttgctggcatcggtaacaggactgcttatctggcatttctggaatttattgcgcctttcatggtggctgtgggtggatcgcagtatgaccccgccaccggggcgtggtagctgggaaccgctactatacggcttacaccagatgcagctgcgaaataaaaaacgccgccgtgaactgggcaatctgattaaacgctttcgtagcggcgcggagtcgctgcccgacgcggtggtgctgaccacggaagagggcggtattttctggtgtaacggtctggcgcaacaaattcttggtttgcgctggccggaagataacgggcagaacatccttaacctactgcgttacccggagtttacgcaatatctgaaaacgcgtgatttttctcgcccgctcaatctggtgctcaacaccgggcggcatctggaaattcgcgtcatgccttatacccacaaacagttgctgatggtggcgcgtgatgtcacgcaaatgcatcaactggaaggggcgcggcgtaacttttttgccaacgtgagccatgagttacgtacgccattgaccgtgttacagggttacctggagatgatgaatgagcagccgctggaaggcgcggtacgcgaaaaagcgttgcacaccatgcgcgagcagacccagcggatggaaggactggtgaagcaattgctgacgctgtcgaaaatagaagccgcaccgacgcatttgctcaatgaaaaggttgatgtgccgatgatgctgcgcgttgttgagcgcgaggctcagactctgagtcagaaaaaacagacatttacctttgagatagataacggcctcaaggtgtctggcaacgaagatcagctacgcagtgcgatttcgaacctggtctataacgccgtgaatcatacgccggaaggcacgcatatcaccgtacgctggcagcgagtgccgcacggtgccgaatttagcgttgaagataacggaccgggcattgcaccggagcatattccgcgcctgaccgagcgtttttatcgcgttgataaagcgcgttcccggcaaaccggcggtagcggattagggttagcgatcgtgaaacatgctgtgaatcatcacgaaagtcgcctgaatattgagagtacagtaggaaaaggaacacgtttcagttttgttatcccggaacgtttaattgccaaaaacagcgattaatccgcctttgtcatcttttattgccataagccagtcgatgctggcttattttctttgcagtcaaaatacgggcgttagattttacaacgattggtgattttttgttcgcgtgattagccatgtctttttcacggaaatagtgttttatactggttggtgatttcttatcgctatatacctctggtttttagatccctccttgctttaaaacgttataagcgtttaaattgcgcttcaggtgctgtcatactgactgcattaacgcggtaaatcgaaaaactattcttcgccgcgcctggttgggagtatttcccgctaaaattgtttaaatataccgctgtatcatccccagggattggcacaaaaatttaacgttacaacaccacatccacaggcagtatgatttatgacccatcaattaagatcgcgcgatatcatcgctctgggctttatgacatttgcgttgttcgtcggcgcaggtaacattattttccctccaatggtcggcttacaggcaggcgaacacgtctggactgcggcattcggcttcctcattactgccgttggcctgccggtattaacggtagtggcgctggcaaaagttggcggcggtgttgacagcctcagcacgccaatcggtaaagtcgctggcgtactgctggcaacggtttgttacctggcggtggggccgcttttcgctacgccgcgtacagctaccgtttcctttgaagtggggattgcgccgctgacgggtgattccgcgctgccgctgtttatctacagcctggtctatttcgctatcgttattctggtttcgctctatccgggcaagctgctggataccgtgggcaacttccttgcgccgctgaaaattatcgcgctggtcatcctgtctgttgccgctattgtctggccggcgggttctatcagcacggcgactgaggcttatcaaaacgctgcgttttctaacggcttcgttaacggctatctgaccatggatacgctgggcgcaatggtgtttggtatcgttattgttaacgcggcgcgttctcgtggcgttaccgaagcgcgtctgctgacccgttataccgtctgggctggcctgatggcgggtgttggtctgactctgctgtacctggcgctgttccgtctggggtcagacagcgcgtcgctggtcgatcagtctgcaaacggcgctgctattctgcatgcttacgttcagcacacctttggcggcggcggtagcttcctgctggcggcgttaatcttcatcgcctgcctggtaacggcagttggcctgacctgtgcttgtgcagaattctttgcccagtacgtaccgctctcttatcgtacgctggtgtttatcctcggcggcttctcgatggtggtttctaacctcggcttaagccagctgatccagatctccgtaccggtgctgaccgctatttatccgccgtgtatcgcactggttgtattaagttttacacgctcatggtggcataattcgtcccgcgtgattgctccgccgatgtttatcagcctgctttttggtattctcgacgggatcaaagcatctgcattcagcgatatcttaccgtcctgggcgcagcgtttaccgctggccgaacaaggtctggcgtggttaatgccaacagtggtgatggtggttctggccattatctgggatcgcgcggcaggtcgtcaggtgacctccagcgctcactaaatcactgaacatttgttttaaccacggggctgcgatgccccgtggttttttattgtgttgatgggttaggaattgatggaaagtaagaacaagctaaagcgtgggctaagtacccgccacatacgctttatggcactgggttcagcaattggcaccgggctgttttacggttcggcagacgccatcaaaatggccggtccgagcgtgttgttggcctatattatcggtggtatcgcggcgtatatcattatgcgtgcgctgggggaaatgtcggtacataacccggccgccagctctttctcgcgttatgcgcaggaaaacctcggcccgctggcaggttacattaccggctggacctactgctttgaaatccttattgtcgccatcgccgatgtgaccgcttttggtatctatatgggtgtctggttcccgacggtgccgcactggatttgggtactgagcgtggtgctgatcatttgcgccgtaaacctgatgagcgtgaaggtattcggtgagctggaattctggttctcgttctttaaagtcgccaccatcatcatcatgattgtcgccggtttcggcatcatcatctgggggattggcaacggcgggcaaccgaccggtattcataacctgtggagcaacggcggcttcttcagtaacggctggcttggcatggtaatgtcgttgcaaatggtgatgtttgcttacggtgggatcgaaattatcgggattaccgccggtgaagcgaaagatcctgagaaatcgataccgcgtgcgattaactccgtgccgatgcgtattctggtgttctacgtcggtacgctgttcgtcattatgtctatctacccgtggaatcaggttggcactgccggtagcccgttcgtgctgacgttccagcatatgggcattacctttgccgccagcattcttaactttgttgtgctgactgcttcgctgtcggcaattaacagtgatgtatttggcgtaggccgtatgctccacggtatggcagagcagggcagcgcgccgaaaattttcagcaaaacgtcgcgtcgcggtattccgtgggttacggtgctggtgatgactaccgcgctgctgtttgcggtgtatctgaactacatcatgccggaaaacgtcttcctggtgatcgcttcgctggcaaccttcgccacggtgtgggtgtggattatgatcctgctgtcgcaaattgccttccgtcgccgtttgccgccagaagaagttaaggcgctgaaatttaaagtgccgggtggggtagcaacgaccatcggcgggctgattttcctgctctttattatcgggttgattggttatcacccggatacgcgtatctcgctgtatgtcggtttcgcgtggattgttgtgctgttgattggctggatgtttaaacgccgccacgatcgtcagctggctgaaaaccagtaatccttgcgttctgtaagccggttcaggaggaaatcctgatccggctattccgaaagttatccgcccccgtcctcctcccccaaatatccttcagatgatgagtgatcctgcattaggctatggcaaggtgatcagattttcatcacaggggaattatgatgttaaatgcatggcacctgccggtgcccccatttgttaaacaaagcaaagatcaactgctcattacactgtggctgacgggcgaagacccaccgcagcgcattatgctgcgtacagaacacgataacgaagaaatgtcagtaccgatgcataagcagcgcagtcagccgcagcctggcgtcaccgcatggcgtgcggcgattgatctctccagcggacaaccccggcggcgttacagtttcaaactgctgtggcacgatcgccagcgttggtttacaccgcagggcttcagccgaatgccgccggcacgactggagcagtttgccgtcgatgtaccggatatcggcccacaatgggctgcggatcagattttttatcagatcttccctgatcgttttgcgcgtagtcttcctcgtgaagctgaacaggatcatgtctattaccatcatgcagccggacaagagatcatcttgcgtgactgggatgaaccggtcacggcgcaggcgggcggatcaacgttctatggcggcgatctggacgggataagcgaaaaactgccgtatctgaaaaagcttggcgtgacagcgctgtatctcaatccggtgtttaaagctcccagcgtacataaatacgataccgaggattatcgccatgtcgatccgcagtttggcggtgatggggcgttgctgcgtttgcgacacaatacgcagcagctgggaatgcggctggtgctggacggcgtgtttaaccacagtggcgattcccatgcctggtttgacaggcataatcgtggcacgggtggtgcttgtcacaaccccgaatcgccctggcgcgactggtactcgtttagtgatgatggcacggcgctcgactggcttggctatgccagcttgccgaagctggattatcagtcggaaagtctggtgaatgaaatttatcgcggggaagacagtattgtccgccactggctgaaagcgccgtggaatatggacggctggcggctggatgtggtgcatatgctgggggaggcgggtggggcgcgcaataatatgcagcacgttgccgggatcaccgaagcggcgaaagaaacccagccggaagcgtatattgtcggcgaacattttggcgatgcacggcaatggttacaggccgatgtggaagatgccgccatgaactatcgtggcttcacattcccgttgtggggatttcttgccaataccgatatctcttacgatccgcagcaaattgatgcccaaacctgtatggcctggatggataattaccgcgcagggctttctcatcaacaacaattacgtatgtttaatcagctcgacagccacgatactgcgcgatttaaaacgctgctcggtcgggatattgcgcgcctgccgctggcggtggtctggctgttcacctggcctggtgtaccgtgcatttattacggtgatgaagtaggactggatggcaaaaacgatccgttttgccgtaaaccgttcccctggcaggtggaaaagcaggatacggcgttattcgcgctgtaccagcgaatgattgcgctgcgtaagaaaagtcaggcgctacgtcatggcggctgtcaggtgctgtatgcggaagataacgtggtggtatttgtccgcgtgctgaatcagcaacgtgtactggtggcaatcaaccgtggcgaggcctgtgaagtggtgctacccgcgtcaccgtttctcaatgccgtgcaatggcaatgcaaagaagggcatgggcaactgactgacgggattctggctttgcctgccatttcggctacggtatggatgaactaacgttttataacgccttgcgtgacgcctgcgccatcatccgcggataaaactgccagaagcgggtttcgagggcgtcataatgagcgtctaaatcgtaccaggagtcacgcagggcatccagacgtgggcggcggcttgccatgccgtttaacacgttctggatgaaatccatatcgcgatagcgcaccagccactgctctgaccacaagtaattgttcagattgataaaacgtggcggtgagtccggcaaaatcgtcatcacttgctcgcgggcataacagacaaattcctgtagcggaaagtccggcgacagctgcgaccagtggcgggaaagaaagtgatcccacatgacatccagcgtaataggcgcaacgcggcgcgtttcactacgaaaccactcccgtgcttcgcggacttccggcagattgtcagtcaatacgtcgatacgtcgatgcatatgaatgccagccacgacgtcgggcggaaaactttcttcaggatttccgcgtacgaaatcagccagtaaattgccggaaagcgagctttccgcgagatgggctaaatgcaggtgagctaaaaaattcatcgattatattctatccaaaagggggtaaaggttgcagggagagcgccccggcactagactacccgcctcttattttagtctgagtcagtgtcatgcgcgttaccgatttctcctttgaattgcccgaatccctgattgcccactatcccatgcctgaacgcagtagctgtcgtttactgtcgctggacgggccgacgggcgcgctgacgcacggtactttcaccgatttacttgataagctcaaccccggcgatcttctggtttttaataatacccgcgtgatcccggcgcgcctgtttgggcgtaaagccagcggcggcaagattgaagtgctggttgaacggatgctcgacgacaaacgcattcttgcgcatattcgcgcctcgaaagcgccaaaacctggcgcagaactgctgctgggcgatgacgaaagtattaacgcaacaatgaccgcgcgccacggcgcactgtttgaagtcgaatttaatgatgaacgctcggtgctggatattctcaacagcatcggccatatgccgctgccgccgtatatcgaccgtccggacgaagacgctgaccgcgaactttatcaaaccgtttatagcgaaaaaccgggcgcggttgcagccccgaccgcaggtctgcattttgacgagcctttgctggaaaaattgcgcgccaaaggcgtggagatggcgtttgtgacgttgcacgttggtgcgggcaccttccagccggtgcgcgtcgacaccattgaagatcacatcatgcactcggaatacgctgaagtaccgcaggatgtggtagacgcggtactggcggcgaaagcgcgcggtaaccgggtgattgcggttggcaccacttcagtacgttcgctggaaagcgcggctcaggcagcgaaaaacgatctcattgaaccgttcttcgacgatacccaaatctttatctatccgggcttccagtacaaagtggtcgatgcgctggtgacgaacttccacttgccagagtcgacgctgattatgctggtttcggcctttgccggttatcaacacaccatgaacgcctataaagcagcggtagaagagaaatatcgcttttttagttacggtgatgcgatgtttatcacgtacaatccgcaggcaattaatgagcgcgtcggggagtaattccgcggcgctggtttaaaacgttggactgtttttctgacgtagtggagaaaaaatgaaatttgaactggacaccaccgacggtcgcgcacgccgtggccgcctggtctttgatcgtggcgtagtggaaacgccttgttttatgcctgttggcacctacggcaccgtaaaagggatgacgccggaagaagttgaagccactggcgcgcaaattatcctcggcaacaccttccacctgtggctgcgcccgggccaggaaatcatgaaactgcacggcgatctgcacgattttatgcagtggaaggggccgatcctcaccgactccggcggcttccaggtcttcagccttggcgatattcgtaaaatcaccgaacagggcgtgcacttccgtaacccgatcaacggcgatccgattttcctcgatcctgaaaaatcaatggagattcagtacgatcttggttcggatatcgtcatgatctttgatgagtgtacgccgtatcctgctgactgggattacgcaaaacgctccatggagatgtctctgcgttgggcgaagcgtagccgtgagcgttttgacagtctcggaaacaaaaatgcgctgtttggtatcatccagggcagcgtttacgaagatttacgtgatatttctgttaaaggtctggtagatatcggttttgatggctacgctgtcggcggtctggctgtgggtgagccgaaagcagatatgcaccgcattctggagcatgtatgcccgcaaattccggcagacaaaccgcgttacctgatgggcgttggtaaaccagaagacctggttgaaggcgtacgtcgtggtatcgatatgtttgactgcgtaatgccaacccgcaacgcccgaaatggtcatttgttcgtgaccgatggcgtggtgaaaatccgcaatgcgaagtataagagcgatactggcccactcgatcctgagtgtgattgctacacctgtcgcaattattcacgcgcttacttgcatcatcttgaccgttgcaacgaaatattaggcgcgcgactcaacaccattcataaccttcgttactaccagcgtttgatggcgggtttacgcaaggctattgaagagggtaaattagagagcttcgtaactgatttttaccagcgtcaggggcgagaagtaccacctttgaacgttgattaatattaataatgagggaaatttaatgagcttttttatttctgatgcggtagcggcaacgggtgcaccggcgcaaggtagcccgatgtctttgattttgatgctggtggtattcggtctgattttctatttcatgatcctgcgtccacagcagaagcgcaccaaagaacacaaaaagctgatggactccattgccaaaggtgatgaagttctgacgaacggtggcctggttggtcgcgtaaccaaagtagcggaaaacggctacattgctatcgcgctgaatgacaccactgaagtagttattaaacgtgacttcgtagctgccgtcctgccgaaaggcaccatgaaggcgctgtaattaaaatttttccctaagggaattgccgtgttaaaccgttatcctttgtggaagtacgtcatgctgatcgtggtgattgtcatcggtctgctgtatgcgcttcccaacctgtttggtgaggatccggctgttcagatcactggtgcgcgcggagtcgccgccagtgagcaaacgctgatccaggtccagaaaacgttacaagaagaaaaaataactgctaagtctgtggcactggaagagggcgctattcttgcgcgcttcgactccactgacacccagttgcgcgctcgtgaagcattaatgggcgttatgggtgacaaatacgtcgtggcgcttaaccttgccccggcaacgccgcgctggctggcagctattcacgctgagccgatgaagctcggccttgacctgcgtggcggcgttcacttcctgatggaagtggatatggacaccgcgcttggcaaactccaggaacaaaatatcgatagcctacgcagtgacctgcgcgaaaagggcatcccgtataccactgttcgtaaagaaaacaactacggcctgagcatcactttccgcgatgctaaagctcgtgatgaagccattgcgtatctgagcaagcgccatccggacctggtgattagcagccagggcagcaaccagctgcgtgcggtaatgagcgatgctcgtctgagtgaagcgcgtgaatatgcggtgcagcagaacattaatatcctgcgtaaccgtgtaaaccaacttggcgtggcggagccggtggttcagcgtcagggtgctgaccgtatcgttgttgaactgccaggtattcaggacactgcgcgtgcgaaagagattctgggtgcgacggcaacgctggaattccgtctggtaaacaccaacgttgaccaggccgctgcggcatccggtcgcgtaccgggcgactctgaagtgaaacagacccgcgaaggtcagccagttgtgctgtacaaacgcgtaattctgaccggtgaccatatcaccgactccacttccagccaggacgaatacaaccaaccgcaggttaacatctcgctcgatagcgctggtggtaacatcatgtctaacttcactaaggacaacatcggcaaaccgatggcaaccctgtttgtggagtacaaagacagcggtaagaaagatgcaaatggtcgtgcggttctggtgaaacaggaagaggtgattaacatcgccaacatccagtctcgtctgggtaacagcttccgtatcaccggcatcaacaacccgaacgaagcccgtcagctgtcactgctgctgcgtgccggtgcgttgatcgcgccgattcagattgttgaagaacgtaccattggcccaaccctgggtatgcagaacattgaacaggggctggaggcttgccttgccggtctgctggtttctattctgttcatgatcatcttctataagaagtttggtctgattgcgaccagtgctctgattgccaacttgatcttaatcgtcggcattatgtcgctgttgccaggcgcaacgctgagtatgccaggtatcgcgggtatcgtcttaacccttgcggtggcggtcgatgcgaacgtactgatcaacgaacgtattaaagaagagttgagcaacggacgtactgttcaacaggcaattgatgaaggttatcgtggcgcattcagttctatcttcgatgcgaacatcaccacgctgattaaagtcatcatcctgtacgcagtgggtaccggggcaattaaagggttcgcgattactaccggtatcggtgtggcgacgtcgatgtttaccgcgattgtcggtacgcgtgccatcgtaaacctgctatatggcggcaagcgcgtcaagaagctgtcaatctgaggagtgcgatgtggcacaggaatatactgttgaacaactaaaccacggccgtaaagtctatgactttatgcgctgggactactgggctttcggcatctctggtctgctgttaatcgctgctatcgttattatgggcgtgcgcggctttaactgggggctggatttcaccggtggtacggttattgaaattacgctcgaaaaaccggctgaaattgacgtaatgcgtgatgcattgcaaaaagccggttttgaagagccgatgctgcaaaactttggtagcagccatgacatcatggtccgtatgccgcctgctgaaggcgaaaccggcggtcaggtgttgggcagccaggttctgaaggtgattaacgaatccaccaatcagaatgcagcagtgaagcgtattgagttcgtcggtccgagcgtgggggcagaccttgcgcaaaccggtgcgatggcgttgatggcagcgctgctgtctatcctcgtgtacgtaggtttccgctttgagtggcgactggcggcaggggtggttattgcgctggcgcacgacgttatcattacgctgggtattttgtcgttattccatatcgagattgacctgaccattgtggcatcgttgatgtcggttatcggttactcgcttaacgacagtatcgtggtatcggaccgtattcgtgaaaacttccgcaagatccgtcgcggtacgccttacgaaatctttaacgtgtccttgacccagacgctgcaccgtaccttgatcacatccggtactaccttgatggttatcctgatgctgtacctcttcggtggtccggtactggaaggcttctcgctgaccatgcttatcggtgtttccatcggtactgcatcttccatctatgtggcatctgcgttggctctgaaactgggtatgaagcgcgaacacatgttgcagcagaaagtggaaaaagaaggggcggatcagccgtcaattctgccgtaatcaagttcccgttgatgttgaaaatcccggtcagaagatcgggattttttttgatgtatggagattgcgaaaatccccgcatcttgggaaactgcgcgtaaccctacatttcatccaggtaacttttcatggctatcatcccaaaaaactatgcgcggttagaaagcggctatcgcgaaaaagcattaaaaatctatccgtgggtctgcggtcgctgttcccgcgagtttgtttattccaacctgcgtgaacttaccgttcaccacattgatcacgaccataccaataacccggaagatggcagtaactgggaattgttgtgtctctattgccacgatcatgagcattcgaaatataccgaagcggatcagtatggtacgaccgttatcgcaggggaagatgcgcagaaagatgtcggtgaagcgaagtacaacccattcgctgacctgaaagcgatgatgaacaagaagaagtgattaaaacgtaaaattgcctgatgcgctacgcttatcaggcctacgttatttcagcaatatattgaatttacgtgcttttgttggccggacaaagcgtttacgccgcatccggcatgaacaaagcacacgttgttaacaatcagaaatgccgggaataaatcccggcattttcataatcagaagttgtaacctactaccaggtaaccaccccagccggtagagcgaacgttgaagttgccgttgccgaagttcagttctgcatcgtcgttccactgaccaccgtcgtgccagtaacgagctacgacagagtagtgccagtgatcgtagttcagagccagaatatggctggaagcgatagagttattagtacgggtcttaataccgttgattgcgttaccgctgtcatcccctaaatcggaaccccagtcgaagttggtgaagccgatgtagctcagctgaccgccccacagatcggtaatcggcacaaagtatttaattttgaaacggtaaccgtcccactcgttttcgttcgctgcgccatagttctgccactggtatttcgcatagacgttcatggacaggctcatcggcaggccagtgtcgatatcggtacccagacccatgtaccaggtgctctggcgaccatctttattacgacccatgtcgtaaatgtagttgttcgcgaagtaccactctttgaacggaccgaagctaaggtcagtattggtcagcttgtcgatggagaaacgtggttcgatttccataaacagcggagaaccgtggttccagatacctttagcatcggagttaccgccgaagaataccggcgcatccgcataaccatagaagtcgaaccagtcttttttagcgaatgcttcgtactcaaggtaggtatcgttgcggatctgcggtccgaaacgggtgtgatagcttccgacaacgttaacgctctggtgccaccagtcggaaagatactgcggtttgtcgttttcagctgcgttgacagtaaaagacgaagagagcgccagtaccgcaccggctgccagtaatgtttttttcatatgtatgccactgtttgaaaatcccttgcgggagtgaaaaaggcgcaaattgcgtttctaaatatttcgtatacagaggagcctattataaaaatcattgctcacaaaaatatgtttcgtttcacagttctatcatttacgtaatcgattgcgttcacgtttacacacattcgggcggggattgtactgactttcgcccttgttgcaaacttttactatcaatccaggtgatgtaagcagagtaacaaaatgacggggaaagatgttgcgggacgcacaaaatcgtcccgaaatacgtttactgcataacaggttgaatgtcgtggatacgtacaaagcctaactgatccacagaaatcccctttaactgtaacggaatatcaacatcgctgggggcgaggacgctggcaggggcattaatcaattgattctgcacattgatttcctgaaagttgtctattgttccctgaatttgcccatattcaacagttccgctgaatgcgggcaagggatcattcgactcaccctgaatacgtagtgtaagggtggtgccatctgcatcaggcgtaatattcaccagcgacatacgtaaagtaccgatctggctttccagtcttgccggtgttttcgctccaggcagaaggtaaaccccactgctggattttgcattcagcctgttttgctgagtgattttgactgtttcttgattgagttgcgtcatctcctggttcagcgtgctgacgctgtgtttcatctgtcgcacttcactttgctgcacacaggcgctaaggctgaacaggcttcccagcaggagcagtcgaaaaacgttagtattcataggtcgtccctttctcgtcgcaattagcctaatggtagagggtaaaagcagcgaaagcatcgatcctttatctcaaaagcgttgcgcctttgttgtatcgtcagttcagggtaaaatagatttccgttaaccacctggtcaggacgccgtatgcattgcccattctgtttcgccgtggacactaaggtaattgactctcgtctcgtgggcgagggttcatccgtacgccgccgtcggcagtgtctggtgtgtaatgaacgtttcaccacctttgaagtggcggagctggttatgccgcgtgttgtaaaaagcaacgacgtgcgtgaaccgtttaatgaagagaaattgcgtagcggaatgctgcgggcgctggaaaaacgtccggtgagttccgatgacgtcgaaatggcaatcaatcatattaaatcgcagctgcgcgccaccggtgagcgcgaagtgccgagcaagatgattggcaatctggtgatggagcaattgaaaaagctcgataaagtcgcctatatccgttttgcctctgtctaccgcagtttcgaagatatcaaagaatttggcgaagagatcgcgcgcctggaggactaagccgtgcaggacgagtattacatggcgcgggcgctaaagctggcgcaacgaggacgttttaccacgcatcccaacccgaatgtcgggtgcgtcattgtcaaagatggcgaaattgtcggtgaaggttaccaccaacgtgcgggtgaaccacatgccgaagtacacgcgttgcgtatggcgggtgaaaaagccaaaggtgcgaccgcctatgtcacactcgaaccctgtagccatcatggtcgtacgccaccgtgctgtgacgcactcatcgccgctggcgtagcgcgcgtggttgcctcgatgcaagatcctaacccgcaggtcgctgggcgtggactttaccgtctgcaacaggctggcattgacgtcagccacggcctgatgatgagtgaagccgagcaattgaataaaggctttctcaagcggatgcgcaccggctttccttatattcagttaaaacttggcgcatcgcttgatggtcgcacggcgatggcgagcggcgaaagccagtggatcacttcgccccaggcgcggcgtgatgtacaactactgcgcgcgcaaagtcatgccattttaaccagcagcgccacggtgctggcggatgatcctgccttaacggtgcgttggtctgaactggatgaacaaactcaggcgctctatccgcaacaaaatctccgtcagccgatacgtattgtgattgatagccaaaatcgcgtgacgccggtacatcgcattgtgcagcagcccggcgaaacctggttcgcgcgtacgcaggaagattctcgtgagtggccggaaacggtgcgtaccttgctgattccagagcataaaggtcatctggatctggttgtactgatgatgcaactgggtaaacagcaaattaacagcatctgggtggaagcggggccaacgctcgctggcgcattgctgcaggcgggtttagtcgatgagctgattgtctatatcgcacctaaactattaggcagcgacgcccgcggattatgcacgctgccagggcttgagaaattagccgacgccccccaatttaaattcaaagagatacgtcatgtaggcccggatgtttgcctgcatttagtgggtgcatgatctcccggctcgaaagggaagcagcgcacgaaatattatgctaaaatccgcccccctgcggggccatactcgaacccgaaggaagaaaatgaacattattgaagctaacgttgctaccccggacgctcgcgtcgccatcaccatcgcgcgtttcaacaactttatcaatgacagcctgctggaaggtgcaattgacgcactgaaacgtatcggtcaggtaaaagatgaaaacattaccgttgtttgggtgcctggtgcctatgagctgccgctggcggcgggtgcactggctaaaaccggtaaatacgacgcggtgattgcgctgggtacggttattcgtggtggcactgcccactttgaatatgtcgctggtggtgcaagcaacggcctggcgcatgttgcccaggacagcgaaattccggttgcttttggggttctgaccactgaaagcattgaacaagcgatcgaacgtgctggcaccaaagctggcaacaaaggtgcagaagctgcactgaccgcgcttgaaatgattaatgtattgaaagccatcaaggcctgaaattagtaaggggaaatccgtgaaacctgctgctcgtcgccgcgctcgtgagtgtgccgtccaggcgctctactcctggcagttgtcccagaacgacatcgctgatgttgaataccagttcctggctgaacaggatgtaaaagacgttgacgtcctgtacttccgtgagctgctggccggggtggcgactaataccgcatacctcgacggactgatgaagccatacctgtcccgcctgctggaagaactgggacaggtagaaaaagcagtactgcgcattgcgctgtacgaactgtctaaacgtagcgatgtgccatacaaagtggccattaacgaagcgatcgaactggcgaaatcgttcggcgcagaagacagccataagttcgtcaacggcgtactcgataaagcagcacctgtgattcgccctaacaaaaagtgatatccaggccggtagattcacggaagaccgttccatgatcgccggccttttcttttttacctgctgaggcataacgtatggcatgtggcgagttctccctgattgcccgttattttgaccgtgtaagaagttctcgtcttgatgtcgaactgggcatcggcgacgattgcgcacttctcaatatccccgagaaacagaccctggcgatcagcactgatacgctggtggcgggtaaccatttcctccctgatatcgatcctgctgatctggcttataaagcactggcggtgaacctaagcgatctggcagcgatgggggccgatccggcctggctgacgctggcattaaccttaccggacgtagacgaagcgtggcttgagtccttcagcgacagtttgtttgatcttctcaattattacgatatgcaactcattggcggcgataccacgcgtgggccattatcaatgacgttgggtatccacggctttgttccgatgggacgagccttaacgcgctctggggcgaaaccgggtgactggatctatgtgaccggtacaccgggcgatagcgccgccgggctggcgattttgcaaaaccgtttgcaggttgccgatgctaaagatgcggactacttgatcaaacgtcatctccgtccatcgccgcgtattttacaggggcaggcactgcgcgatctggcaaattcagccatcgatctctctgacggtttgatttccgatctcgggcatatcgtgaaagccagcgactgcggcgcacgtattgacctggcattgctgccgttttctgatgcgctttctcgccatgttgaaccggaacaggcgctgcgctgggcgctctctggcggtgaagattacgagttgtgtttcactgtgccggaactgaaccgtggcgcgctggatgtggctctcggacacctgggcgtaccgtttacctgtatcgggcaaatgaccgccgatatcgaagggctttgttttattcgtgacggcgaacctgttacattagactggaaaggatatgaccattttgccacgccataaagatgtcgcgaaaagtcgcctgaagatgagtaatccgtggcatctacttgctgtcggattcggaagtggattaagcccgatcgttcctgggacgatgggctcgctggcagcgattccgttctggtatctgatgacctttttgccctggcagctctactcgctggtggtgatgctggggatctgtatcggcgtctatctttgtcatcaaacggcgaaagacatgggtgtgcacgatcatggcagcattgtctgggacgaatttattggtatgtggatcacgctcatggcgctgccgaccaatgactggcagtgggttgccgccgggtttgtgattttccgtattctggatatgtggaagccgtggccgatccgctggtttgatcgcaatgtgcatggcggcatggggatcatgatcgacgatattgtcgccggggtgatttccgcaggcatcctgtattttatcggtcatcactggccgctgggtattctgtcgtagttgtgcaccgatgcctgatgtgacgcttgtcacgtctcatcaggcctggactcttatttaaatcctacgacaggatgcggtttatacggcgtttccagttcggcaatctgttccggcttcaaagtgatatccaccgcgttcaatagctcatcaagctgttcttcgcgcgaagttccgataatcggtgcggcaatgcccggtttactcaacaaccaggccagcgcaacttgtgctcgtgtcgcccccagttcttcactgacgcctgttaaccgctctgcgatctgcgcgtcattttcatcgctttctttatagagatttttccccacctcatcagacaccagtcgtgcggtagtttctccccacggacgcgtcagacggccccttgccagcgggctccatggaattaccgccacgccctcctgataacacagtggtagcatctcgcgctcttcttcacgataaatcagattgtagtgatcctgcatactgacaaactgcgcccagccgtgctgtttttggagttccagtgcctgagcaaactgcgaagcgtgcattgatgacgcgccgatataacgcgctttcccggcttttaccacgtcgttgagggcttccagcgtctcttcgatcggcgtgttgtaatcccagcgatgaatttgcaggatatcgacataatccatgccgagacgtcgcaggctgtcgtcgatagagcgcaaaatttgcgcacgggataatccttccggtaaatcaccaacgcgatggaacactttggtcgcaacgaccacgtcttcacgacgggcgaaatcccgcagtgcgcgaccgacgatctcttcgctgctgccgtcagaataactgttggcggtatcaaagaaatttatgccgccttccagtgcacgtttaattatgggacggctgctttcttccggcagtgtccatgcgtgattaccgcgatctggctcgccaaaggtcatacagccgaggcaaagtcgggaaacgcgaaggtcggtttttcctaaggggttgtattgcatgctgccactcctgctatactcgtcatacttcaagttgcatgtgctgcggctgcattcgttcaccccagtcacttacttatgtaagctcctggggcttcactcgtttgccgccttcctgcaactcgaattatttagagtctatgaataatttcttaagcatagcaggagtggagtagggattatgccagccaggccttgattttggcttccataccagcggcatcgaggccgagttcggcgcgcatttcttcctgagttccttgcggaataaagaagtccggcaggccaatgttcagcacgggtactggtttacgatgggccatcagcacttcgttcacgccgctgcctgcgccgcccataatggcgttttcttctacggtgaccagcgcttcatggctggcggccatttccagaattaacgcttcatcaagcggtttcacaaaacgcatatcgaccagcgtggcgttcagcgattcggcgactttcgccgcttctggcatcagcgtaccaaagttaaggatcgccagtttctcgccacgacgcttcacaatgcctttgccaattggtagtttttccagcggcgtcagttccacgccgaccgcgttgccacgcgggtagcgcaccgctgacgggccatcgttatagtgatagccggtatagagcatctggcgacattcgttttcatcgctcggggtcataatgaccatttccggtatgcagcgcaggtaagagagatcaaaagcaccctgatgggtttgaccgtcagcaccaacaatgcccgcgcggtcgatggcgaacaggaccggaagcttttgaatcgccacgtcatgcagcacctgatcataggcgcgttgcaggaaagtggagtaaatcgcgacaatgggtttgtacccaccaatcgccagacccgcagcaaaggtcaccgcgtgttgctcggcaattgccacgtcgaagtagcgatccgggaatttacgtgaaaactcgaccatgccggaaccttcacgcatcgccggagtaatcgccatcagcttgttgtctttcgctgccgtttcgcacaaccagtcgccaaagatttttgaatagctcggcaaaccgccgctacttttcggcaaacaaccgctggagggatcaaatttaggcacggcgtggaaagtgatcgggtctttttctgccggttcataaccacgaccttttttggtcatgatatgcaggaactgcgggcctttcaggtcgcgcatgttctttagcgtggtgataagccccagcacatcgtgaccgtccaccgggccgatgtagttaaagcccagctcttcaaacaacgtgccaggcactaccatgcctttaatatgttcttcggtgcgtttgagcagctctttaattggcggcacgccagagaaaacttttttcccgccttcgcgcagtgaagagtaaagcttaccggaaagcagctgtgccagatggttgttgagcgcgccgacattttcggaaatcgacatttcattgtcgttgagaatcaccagcatatcaggacggatatcgcccgcgtgattcatcgcttcaaacgccatgcctgcggtaatcgcgccatcgccaatgacacagacggtgcggcgatttttgccttctttttcggcagcaaccgcaataccaattccggcactgatggaggttgatgaatgcccgacgcttaatacgtcatattcgctttcgccgcgccacgggaacgggtgcagaccgcctttctgacggatggtgccgattttgtcgcggcgtccggtcaaaattttatgcggataagcctgatgccccacatcccaaatcaattggtcaaacggggtgttgtagacatagtgcagcgccacggtcagttcgaccgtgcccagcccggaggcgaagtgcccgctggaacggctcacgctgtcgagtaaatagcggcgcagttcgtcgcagagtttcggtaaactctctttcggcaacagtcgtaactcctgggtggagtcgaccagtgccagggtcgggtatttggcaatatcaaaactcatcaggggcctattaatacttattgtttatttattacgctggatgatgtagtccgctagcgcttccagtgccgaggtatcgagtgactgttcagccagttgtttcagcgactgacgggcatcgtcgatcagatcccgggctttcttccgggcttgctcaagacccagaagtgcagggtaggtacttttaccaagttgctggtcggcaccctggcgttttcccaacgttgcagtatctcccaccacatccaggatgtcatcctgaacctggaaggcaaggccgatgctctctgcatacttgtcgagtaccggcagagcacgacgtcctttatctccggcgcttaatgcaccaaggcgaacggcggcgcgaatcaatgcgccggttttatgacgatgaatacgctcaagcgcgtccagaggtacgtgtttgccttccgcgtctaaatctaatgcctgaccaccgcacattccggcaataccactggcgctcgccagttcagaaatcatcgaaattctgtcgcggtccgacacttccggcatatcggcatcgcttaaaatcgagaacgccagcgtttgtaaagcgtcgccagcgagaatcgcgtttgcttcgccaaacttcacatggcaggttggcaaaccgcgacgcagatcgtcatcatccattgccggtaaatcatcatgaattaatgagtaagcgtggatacactcaacggcggcagcgggtgcgtccagcgtgtttgtgctaacgccgaacatatgaccggtggcataaaccaggaaaggtcgcaggcgcttaccacctaataatgcgccatactgcatggtttcgaccacgggagtgttctgaaagggcagtggggcgataaaacggctcagcgcctggttggcctgcttaacgcaggcttcgagttgctgcggaaagtccattactcattgtccggtgtaaaaggggttagagaggcgtcttcattgtcagacagcagaatttgtacgcgctgttcggcttgttgtaatttggcctgcccctgacgtgccagctgcacgccgcgttcgaactcgttcagcgcctcttccagcggcaggtcgccactttccagacgggttacaatctgttccagctcgctcagcgccttttcaaagctggcgggcgcctcatttttcttcggcataatgaatgtctgactctcaatatttttcgccccgtcatggtaacggactcagggcaaatagcaaataacgcgcaatggtaaggtgatgtgcacagcaaagcgatgttagtggtatacttccgcgcctggatgcagccgcaggtgtgggctgctgtatttttccctatacaagtcgcttaaggcttgccaacgaaccattgccgccatgaagtttatcattaaattgttcccggaaatcaccatcaaaagccaatctgtgcgcttgcgctttataaaaatccttaccgggaacattcgtaacgttttaaagcactatgatgagacgctcgctgtcgtccgccactgggataacatcgaagttcgcgcaaaagatgaaaaccagcgtctggctattcgcgacgctctgacccgtattccgggtatccaccatattctcgaagtcgaagacgtgccgtttaccgacatgcacgatattttcgagaaagcgttggttcagtatcgcgatcagctggaaggcaaaaccttctgcgtacgcgtgaagcgccgtggcaaacatgattttagctcgattgatgtggaacgttacgtcggcggcggtttaaatcagcatattgaatccgcgcgcgtgaagctgaccaatccggatgtgactgtccatctggaagtggaagacgatcgtctcctgctgattaaaggccgctacgaaggtattggcggtttcccgatcggcacccaggaagatgtgctgtcgctcatttccggtggtttcgactccggtgtttccagttatatgttgatgcgtcgcggctgccgcgtgcattactgcttctttaacctcggcggcgcggcgcatgaaattggcgtgcgtcaggtggcgcattatctgtggaaccgctttggcagctcccaccgcgtgcgttttgtcgctattaatttcgaaccggtcgtcggggaaattctcgagaaaatcgacgacggtcagatgggcgttatcctcaaacgtatgatggtgcgtgccgcatctaaagtggctgaacgttacggcgtacaggcgctggtcaccggcgaagcgctcggccaggtgtccagccagacgctgaccaacctgcgcctgattgataacgtctccgacacgctgatcctgcgtccgctgatctcttacgacaaagagcacatcatcaacctggcccgccagattggcaccgaagactttgctcgcacgatgccggaatattgtggtgtgatctccaaaagcccgacggtgaaagcagttaaatcgaagattgaagcggaagaagagaagttcgacttcagcattctcgataaagtggttgaggaagcgaataacgttgatatccgcgaaatcgcccagcagaccgagcaggaagtggtggaagtggaaaccgtcaatggcttcggcccgaacgacgtgatcctcgatatccgttctatcgatgaacaggaagataagccactgaaagtcgaagggattgatgtggtttctctgccgttctataaactgagcaccaaatttggcgatctcgaccagaacaaaacctggctgctgtggtgtgagcgcggggtgatgagccgtctgcaggcgctctatctgcgcgagcagggctttaacaatgtgaaggtatatcgcccgtaatttgtggtttttacgtcgcatctggtcagatgcgacgtttgccgcatccgacactactcgtaataattataaatccctgccgccatcaccagttgtgatgccacttcatgggctttttcacgcccaaccaacaggtcgataattttcagaccaaagtcgatagctgtacccggcccctggctggtcagcaattttacccgtgcatcccagacgacgcgcttgtccagccattgttcggcgggaattttgtctttcagcgtcgggaagccggtcatattaccaatcgggaagatatcgtgcggcaccagcacggtggctggcgcggcgcaaatagccgcgacgatacgcccggaacggtggaactgtttaacggtttcaaccagcagagtgctatcgcgaaaacactccgcgcctttaatgccaccaggcagcacgatcacgtcatattcgccatcagccacttcgaccagcggcgcatccgccagcagcttcacgccgcgcgagcaggtaatcgccaggttaccatcgctggcgacgctggcagtggtgactttgataccgccgcgaaccagcagatcgatagtggtgacggcttcagtctcttcactaccaggggcgaggcaaaccagtgccgatgcgctcatattcactctcctttctttttaccatttcaaacaggcgggtgttttccggtacggcaatcccatgcgcgcgggcgcggcgtaagagaaaaccattgatatagtcgatttcagtgtggcgcagcgcgcggatatcctgcaacatcgacgagatattttccgctgtggcatcaatcacctgcatcacgtaatcacgcaaatcttctgctgaagtatgatgcccttcgcgttcgatcaccgccgcgacttcttcgcatatctgcataatttcttgcggatgatgacgtaattcaccgttcgggcaattccagatggcagtcagtggattaatcacgcagttgactgccagcttgcgccacagctcggcgcgaatattgttatgccaggcaacgtcaggcaacacggtttgcaaaatatccgccagataactgtaatccccgtcctgttgccgtgccgggccaatatgcgtgataccgtttgccacatgaataatgacattgccgtcgcggcgggctgcatgggtggtggtgcccatcagtaatggctgctgaatgttttgcaactcttcgatggtgcccatgccgttgtgaattaacagtattggcgtagttacaggcagtgtggacgcgaggcttttgacggcatcggaaacctgccatgctttcagcgtcaccaggagcagatcgctggtggcgagaaaatcgggatcgttggcggtcagcgattcgttaaatatcgaaccatctgtctcaaccagattcacgctacaataaggttgcggtacgcgcagccagccctgaacttcatgaccctgtttgcaaagtgctgtaagccataattgccctaaggcaccgcatcccaatacggtaattttcattgttcctcctcacccgcaaccactccgggtgttcaataaggctatcccttaattgtgcatgctgttgcgactatgcacaattaagggatacgtcctggtgcaggactgtcggttatttaactttgcgggtattatgcttcgcatcaaaaatgaagggagaggaaaagatgccatctttcgatattgtctctgaagttgatcttcaggaagcacgtaacgcggtcgataacgcgagccgcgaagtggagtcccgttttgacttccgtaacgttgaagcctcatttgagctgaacgacgccagcaaaaccatcaaagtgttgagcgagtccgatttccaggtcaatcagttgctggatattctgcgtgccaagctgctgaagcgcggcattgaaggcagttcgctggatgtaccggagaatatcgttcatagcggtaaaacctggtttgtggaagcgaaactgaaacagggcattgagagcgcgacccagaagaaaatcgtcaagatgatcaaagacagcaaactgaaagtgcaggcgcaaattcagggcgatgaaatccgcgtaacgggcaaatctcgtgatgatttgcaggctgtcatggcgatggtacgtggtggcgatctcggtcagccgttccagttcaaaaacttccgcgattaatcgcgactatgtgcgttttgttcatgtcagatgcggcatgaacgcctgattcggcctacaaaggtttgtaattcagaaactttgtaggcctgataagcgtagcgcagcaggcaattcgccgcgttttttatgcctgacgaattgcctgttctatctcaaagcgattcgtcactttgctgtcgattttcacataagctgaatgttcttcttctgcaatcaacacttctttgatgccttcagtttctagcaaacgcacttttaacgcctcgtttgcggcaatgttcgccgggatttcaatgcgcaaactgctgacatacggcggttctttcatggtactggcgactgtcagccacactgcggccagcattgcgccagcgagaaataccccctgaccgtcaaacatgccgttaatccagccgcccagcgaaccgccaatcgccacgccaagaaactggctggtggagtaaacacccatcgccgtacctttgtaacctgctggcgactctttactgataagtgagggcaggagggcttccatcaaattaaacgccacaaagaaaagctgcacgccgaccaccagttgccagaactgcgtttgcgcgttccacaacacaatttccgcaaccacgatcaacccgacgcagaagacaaagacttgcttcattttgcgcttaacttcagcgtagataatgaaaggcacgaccgagccaaaggcgattagcattgtcgccagatagaccttccagtgttcagccgccgggaaccctgcatcagccagttgtccgggcagggcaacaaacgtcgacatcagcaaaatatgcagacacataatgccaaagttgagtttcagcagccgcggttccgccagcactttactgaaactgcctttcaccattccggactcacgattaagtacgtgagtgctactgttgggcacaacccaaatggtcaacgcaatgccggtcgttgccagaatagcgatcatccagaacagcgcgtgcagcccaagtttgtgagtgatgatcgggccaagcaccatcgcaatggcaaaggtaatgccaaagctcacgccgataaacgccatcgctttggtgcggttttgttcgcgcgtgagatcggaaagcagcgccataacggcggcggcaattgctccagagccttgtagcgcccggcccagaataattccccagatggagtcggaaagcgcagcgataacgctaccggcggcaaacaccgccagcccaccgacaattaatggtttgcgaccaatgcggtcggaaagcaggccaaacggaatctgaaaaacggcctgagtcagaccataaataccaatggcaataccgattaatgcttcgctggcaccttgcagagccatgccgtacgtggtcagaaccggcagaaccataaacatgcccagcatgcgcaacgagaatacggtccctaaaccccaggtcgcgcgcctctcacctggcgtcattttataatcgttcattaccacctctgttttaaattcgcgactagtgtaaagcggcaaacgaatggggtaaacatgcggattttttagtaaatatttcgagagggatatgtttctaatgctaagaaaaaaggtgccgtagcacctttttaatagagaggttttgttaccacacagcagccagcagcgtatgcgagtccggtaccataaaatcaacggacatcatcaccgagagggcagtgatggcgatgatagagaagccgaacagcttgcgcgcccagattctgtcatcagcaactttataaccgcgcagagccatacctaaccaccagacgctaaccgccgcggcgaccaccagatatttatacccagcgtaaccgccaagagagagcatcagcgtggcaacggcaaaggcgatgatatacagcgtgatgtgattcttcgccaccgaaatgccttttaccactggcaataccggaatgtttgccgcctggtaatccttaaagcggaaaatggcgatggcataggagtgaggcatctgccacaggctgaagatagccagcaggatcgctgcgccgctatcgaactcaccggttaccgcacagtagccgatcaccggcggcgcagcgccggagagcgaaccaatcaacgtgccgtagacagagtggcgtttcatgtacaggctataaacgccgacataaaccacaaagcccatcacccccagccagcaggccagcggattcgcgccaaaccacagcagcataaagccagcaatacccagcaacgtggcgtacaccagcgagacagcaggagagatcaggcctttcaccagcacccgattcttcgtcctttccatctttctgtcgatatccctgtcgatgtagttgttaaacacacaacccgacgccacaaccagtgacaccccaaccagcgtgtagataaacaggggataatcaatgctgccctttgaggccagcaggaatcccccaatcaccgagatcaggttgccaaagatgatgcctggtttcgttacttgcaggtattgcttaaacatcataaccgccgctcttagtgcatcatcatgttgtagttgaggttccacataatccagatggagcctacaaccaggatagcgatgattagcacggtgaagacaaacgccgtcatgttccagccttcatctgatttggtattcatgtgcaggaagcacaccagatgcaccagaacctgtaccactgccattgccaggattgttcccagaattacggccggagaggcagctcctgtcatcaccatccagaacggaatcaccgtcagaatgatcgacaggataaagcctgtcatgtaggtttttacgctgccatgggacgcgccgctgtgatcggtagaatgactcattacatcgcccccatcagataaacaacagtgaacacacagatccaaaccacatccaggaagtgccagaacaggctcaggcacatgatgcgggtacggttagtgctggtcaggccgcgacgggcgatttgcaccatcagcaccgccatccagataagaccagaagtgacgtgcagaccgtgcgtgccgaccagcgcaaagaacgctgacaggaagccgctgcgatccggacccatgccgttaacaatcaggtgatggaattcatagatttccatcccgataaatccggcaccaaacaaccaggtcaacgccagccaggagataacctggcttttgttgtttttgtacatggcgatagccgccatgccgtaggtgatggagctgaacaacagcaagaaagtttcaaccagaacgaacggcagttcgaaaatgtccttacctgtcgggccgcctgcggtgccgttcaccagaacggcataggtagcaaacaagatagagaacagaatgcagtcgctcatcaggtagatccaaaatccgaagattttggttccgcctgcatcgtggtgcccgtgttcgtgcgcgtgggcagtcgcgtgcgtcaaagtatcagttgccatttttcagccctgccttagtaatctcatcgaaatgctggttttccagtttttcgatttctgccaccggcacgtagtaatccacgtcctcgtcgaagcttttcacgatccaggtgatgatcatgcctgcgaagccaacaatcgccagccaccagatatgccagatcatggcgaaaccgaagatggtggagaaagctgcaatgacgatacctgcaccgctgtttttcggcatatgaatttcttcatagtggtcaggctttttatacgcttcgcctttctctttcatttcccagaatgcatcacgttcgtgaacgtgcggcactacggcaaagttatagaacggaggcggggaagaggttgcccactccagcgtacggccaccccacgggtcgccagtcaggtcacggttctggtcgcggtcgcgaatagaaacgtacatctgaataacgaggcagagaatacccagcgcaatcagtactgcaccgctggctgcaatcatcagcatggtgtggaactgcgggtcaatctgctggctcaaacgacgggtcatgcccatgaagcccagcgcatacagtggcataaaggcaacgaagaagccgatgatccagaaccagaacgcgcgtttaccccaggtttcgttcagtttgaaaccgaacgctttaggccaccagtaggtcatccctgcgaagcagccgaagaccacgccgccgatgatcacgttatggaagtgcgcaatcaggaacaggctgttatgcagaacgaagtccgcgcccggtacggccagcagcacgccagtcatcccgcccaccgagaaggtgacgataaaaccgatggtccacagcatcgcagaatggaacacgatgcggccctgatacatggtgaacagccagttgaagatcttcaccccggtcgggatggcgataatcattgtggtgataccaaagaaggcgtttacgttcgcgcccgcacccatcgtaaagaagtggtgcagccaaacgatgaacgacagcacggtgatacagacggttgcccataccagcgaggtataaccaaacagacgtttacgcgagaaggttgccgcaatttcggagaacacaccgaaaacaggcaggatcaggatgtaaacttccgggtggccccaggcccaaatcaggttgatgtacatcatcatgttgccacccatatcgttggtaaagaaatgggtgcccagatagcgatccagggtcaacaacgcgacggtaaccgtcagaattgggaaggaagcaataatcagtacgttcgcgcacagtgatgcccaggtaaatactggcatcttgaacatggtcatgcccggtgcgcgcatcttcagaatggtaacgaagaagttgataccggtaagcgtcgtacctataccggatagctggagactccatatccagtaatcgacaccgactcccggactgtactctattcccgatagcggtggataggccagccagccggtctgcgcaaattcgcccacgccgagagaaacgttaaccagaatcacaccaacaacggtaaaccagaagcttaagttgttgaggaacgggaacgcaacgtcacgcgcgccgatctgcagcggaaccaccaggttcatcagaccgataacgaaaggcatcgccacgaagaagatcataatcacgccgtgcgcggtaaagatctgatcgtagtggtgaggtggcaggaagcccgcttcgcccgccgaggcaagagcctgctggctacgcatcataatggcgtcagcaaaaccacgcagcaacatcacaatcgccacgatgatatacatgataccgaggcgtttatggtcgacggaggtcagccactctttccacaggtaggtccacttaccgaagtaagtgatcaggccaacgagcgccagacctcccaaaataatgccagcgatcgtaaccatgacgataggttcatggaacgggactgcatcaagtgataattttccgaacatctttattcttcctcaacccctttaatgggcggattccgcgtggctcatgtccatgccttccataccttcgtgtgcgctgtgctcaccttctggctgggtcatgtccatgctcttaccgtgagccataaacttgttaattacatcggcaaacaagtctggtttcacgttggagaaatattccacctggttgtattcgctaggcgcggccagtttttcgaacgcagccatgtcagacatggtgttcggcgactgcttcgcttttgcgacccactggtcgaatgcggcgcgatccggtgttgcaatagctttgaacttcatgcctgagaagcccgggccgctgtagctggcggagataccgtcataagtgccgggttcgttggcgatcagatgcaggcgagtctgcataccggccatggcataaatctggctacccagacgcggaatgaagaaggagttcatcacggagttggaggtcactttgaagtacaccggagtgttcgccgggaaagcgatttcattcacggtagcaatgccctgttccgggtagatgaagaaccatttccagtccatggaaaccacttcgatggtaatgggcttctcgtcgtgtgccagcggcttgctaggctcaagagcgtgagtggttttccaggtcagtactgcaaggaagatgatgattaagataggtaccgtccagaccacagcttccactttattggagtgtgaccagttcgggctgtacttagcatctttattgctcgcacggtacttccaggcgaaaccaacagccatcaagattgcgggaataacgacaatcaacatcaggccaaatgccgtcagtatcagtgaacgttgctccagaccaatctgtcctttgggatctaacagcgcagaattacagccactgagcaatacagtgcctgcaaataatgacaaccatcccaaacttttattgtatttcctgagtctcatttaacgacctcaattccacgggatctggtggcgtttaaagtgtgtgggcattttacgggaaggttacattactgtaaacatgattaaattcctgttacttggatttggctgccaggtcacatatgttgcaaaacatatcaggttgattttaagaagctgttgcaaaagggcgttataacaaaaggggagtgctgaaggagtctgggcgggcaattggtataaccaatgtgaaataaaacaattatttaacaaataattatcattagagtgacaactgggtgatgagaaaataaagactcattagctgaatcgtgtaagaaaaatagaatttataaatggcgccaataatttccaaacgctaagccgcacaaaagaacaaatattaataagcgatactgatgtttatttagccgtaataattacggcgagtgattactacagctaaataatatttacagattacgtcagatgcgtttttcgtagcgccagataatccagcaaaccaccaagcacgacgccagaaagggcgactaaaaccccgacttccagcagagcaggcaggaaagagaagtgcgtcaaatccagcgcgtccatcgtcaatagcagtaaccacacggccaacaggctgacgcccgccgccagtgtccacatggcaaaggcataacctgccggatatgcggtacgggagataaagttgtcatttactcgtgtatattcaagcgtctggcggcaaaccagcagcaaaataagccctggtacggcagcggcgacggagaatagatagaatgtcgaccagccgtgtgcttcaacaaaccaacccgccacggggccgacataaactcgccctacagcagaaagcgctgagagcagggcaaattgagtagcggaaaatgacttattacatagcgtcattaacagcgcgacaaaggctgatgtgcccatcccgccacagaggttttcgaaaaagacggctgcgcccatgctgtagagatgcttatcagtaatcgacagcagccagtaaccggcgttagacgcaccttgtaaaatgccgaaaatcagcagtgcccggaacagtgacaggcgctgcatcaaaatcccaccgtacaatgcgccaacaatggtcgctagtaagccaagcgttttgttaaccacgcctacttcacccgcatcaaacccgacgccgcgaatcaaaaacgtggttgtcaggctcatggcgaatgcgtcgcccagcttatacagcacgataagaagcaaaataagccaggcattattgcgaccaaagaaatctcgcagaggtgcaacaaccgcttgttccagcgttttgggcacaggaatggtgtcggttggttctggtgcaagcaacgtcgcgataatacaggggatcaacagtgccgccattaaccagtacatgccctgccagcccagccatttatctgccagccacagggctaggccgccggaaaccagcatccctaaacggtaacccagcacgctgattgccgcgcccgcaccacgttcttctgccggaagcacatcggttttccacgcatcgaagactatatcctgggaagcagagcaaaaagcgatcaccactgccagcgccgccatccagcggagttgggtgcctggttcgagaaaacccatcgccgcaatggcgactaataacaggatttgcgtggcgagcagccaaccgcgccgccgcccaaaaaatggaggcgtgtagcggtccatcagcggtgaccagaggaatttaaaaacgtaagcctggcctaccagagagaagaaaccaatggttttgagatcgatattctcgaccgtcatccaggcctgtaaggtaccggatgtcagggcgagcggtagcccggaagcaaaacccaggatcagcaatatggctgaacgcggctgttgaaaaatacgtaaatattgactggacatgggcgtctacaggcccggcttgcaccgggccagagggcagaaattaacgcgcgttctgcttgatgaattcgtggatgctggtgtcctgagacatatcagcgatggtatcggtcagcacactgttaaccgcatcggcgatatttttgttggaggcctggaacgcaccttcaacgttgtagctggcacgatagtttttggtcattttgttgccattctgcgcggtagcgatgatggcgatatccgctttggtcgcgatgttgtagcgcacgttgccctgggacacgtcagcatacagttggctaacgatgatttgcagattaaccgggccattcggaccaaccatgtaaccacgcgcggtcatctgtttttccagcacttcttgcagcaggaaacgcagatcgcgggaggcggtcagggtaacgatttgattatcgcgggtgacttttgccagcgcctgatcggtacgctgatcggcaccattaatgcttacggtgacgcccatcaggcttggatcctgctgtggcagtgtaatcgtcggggaaacttcaatagttgttggcggttttgcgcatcctgcaagcataaacagagcaactaacgggaagaggatttttttgaacatgttcgggctctcagagactcttaagcgtgtttggtaaaaattcccgccatcataacattgccaacggcgaggggaagtgggtaaggcatgtaaattcatcatgttgacgaaataatcgcccctggtaaaagaaacactgatgcgaggcctgtgtttcaatctttaaatcagtaaacttcatacgcttgacggaaaaaccaggacgaaacctaaatatttgttgttaagctgcaatggaaacggtaaaagcggctagtatttaaagggatggatgacatctcagcgttgtcggaggagatatttcatgatgatacgtgagcggatagaagaaaaattaagggcggcgttccaacccgtattcctcgaagtagtggatgaaagctatcgtcacaatgtcccagccggctctgaaagccattttaaagttgtgctggtcagcgatcgttttacgggtgaacgttttctgaatcgtcatcgaatgatttacagtactttagcggaggaactctctactaccgttcatgcgctggctctgcatacttacactattaaggagtgggaagggttgcaggacaccgtctttgcctctcctccctgtcgtggagcaggaagcatcgcgtaaaaacgcatttgcaactgtcggcgcttttccagtatgttgctaaagattttatgaaaaacggcctgcgggccgttttgttttgtctggattttgcgctttttgcccagcattcagacgaaaattgcccgggaattgtgaaaaaatacgcgacagcgcgcaataaccgttctcgactcataaaagtgatgccgctataatgccgcgtcctatttgaatgctttcgggatgattctggtaacagggaatgtgattgattataagaacatcccggttccgcgaagccaacaacctgtgcttgcggggtaagagttgaccgagcactgtgattttttgaggtaacaagatgcaagtttcagttgaaaccactcaaggccttggccgccgtgtaacgattactatcgctgctgacagcatcgagaccgctgttaaaagcgagctggtcaacgttgcgaaaaaagtacgtattgacggcttccgcaaaggcaaagtgccaatgaatatcgttgctcagcgttatggcgcgtctgtacgccaggacgttctgggtgacctgatgagccgtaacttcattgacgccatcattaaagaaaaaatcaatccggctggcgcaccgacttatgttccgggcgaatacaagctgggtgaagacttcacttactctgtagagtttgaagtttatccggaagttgaactgcagggtctggaagcgatcgaagttgaaaaaccgatcgttgaagtgaccgacgctgacgttgacggcatgctggatactctgcgtaaacagcaggcgacctggaaagaaaaagacggcgctgttgaagcagaagaccgcgtaaccatcgacttcaccggttctgtagacggcgaagagttcgaaggcggtaaagcgtctgatttcgtactggcgatgggccagggtcgtatgatcccgggctttgaagacggtatcaaaggccacaaagctggcgaagagttcaccatcgacgtgaccttcccggaagaataccacgcagaaaacctgaaaggtaaagcagcgaaattcgctatcaacctgaagaaagttgaagagcgtgaactgccggaactgactgcagaattcatcaaacgtttcggcgttgaagatggttccgtagaaggtctgcgcgctgaagtgcgtaaaaacatggagcgcgagctgaagagcgccatccgtaaccgcgttaagtctcaggcgatcgaaggtctggtaaaagctaacgacatcgacgtaccggctgcgctgatcgacagcgaaatcgacgttctgcgtcgccaggctgcacagcgtttcggtggcaacgaaaaacaagctctggaactgccgcgcgaactgttcgaagaacaggctaaacgccgcgtagttgttggcctgctgctgggcgaagttatccgcaccaacgagctgaaagctgacgaagagcgcgtgaaaggcctgatcgaagagatggcttctgcgtacgaagatccgaaagaagttatcgagttctacagcaaaaacaaagaactgatggacaacatgcgcaatgttgctctggaagaacaggctgttgaagctgtactggcgaaagcgaaagtgactgaaaaagaaaccactttcaacgagctgatgaaccagcaggcgtaatttacgcagcataacgcgctaaattcgcacaaaggcccgtcaccgccaggtggtgggcttttttttgtcatgaattttgcatggaaccgtgcgaaaagcctctttcggtgttagcgtaacaacaaaagattgttatgcttgaaatatggtgatgccgtacccataacacagggactagctgataatccgtccataaggttacaatcggtacagcaggttttttcaattttatccaggagacggaaatgtcatacagcggcgaacgagataactttgcaccccatatggcgctggtgccgatggtcattgaacagacctcacgcggtgagcgctcttttgatatctattctcgtctacttaaggaacgcgtcatttttctgactggccaggttgaagaccacatggctaacctgattgtggcgcagatgctgttcctggaagcggaaaacccagaaaaagatatctatctgtacattaactccccaggcggggtgatcactgccgggatgtctatctatgacaccatgcagtttatcaagcctgatgtcagcaccatctgtatgggccaggcggcctcgatgggcgctttcttgctgaccgcaggggcaaaaggtaaacgtttttgcctgccgaattcgcgcgtgatgattcaccaaccgttgggcggctaccagggccaggcgaccgatatcgaaattcatgcccgtgaaattctgaaagttaaagggcgcatgaatgaacttatggcgcttcatacgggtcaatcattagaacagattgaacgtgataccgagcgcgatcgcttcctttccgcccctgaagcggtggaatacggtctggtcgattcgattctgacccatcgtaattgatgccagaggcgcaactgtgccgctatacttatccagggcggcacaacgctgtaagcggcttgcgcctgagaatggcatttgcgtcgtcgtgtgcggcacaaagaacaaagaagaggttttgacccatgacagataaacgcaaagatggctcaggcaaattgctgtattgctctttttgcggcaaaagccagcatgaagtgcgcaagctgattgccggtccatccgtgtatatctgcgacgaatgtgttgatttatgtaacgacatcattcgcgaagagattaaagaagttgcaccgcatcgtgaacgcagtgcgctaccgacgccgcatgaaattcgcaaccacctggacgattacgttatcggccaggaacaggcgaaaaaagtgctggcggtcgcggtatacaaccattacaaacgtctgcgcaacggcgataccagcaatggcgtcgagttgggcaaaagtaacattctgctgatcggtccgaccggttccggtaaaacgctgctggctgaaacgctggcgcgcctgctggatgttccgttcaccatggccgacgcgactacactgaccgaagccggttatgtgggtgaagacgttgaaaacatcattcagaagctgttgcagaaatgcgactacgatgtccagaaagcacagcgtggtattgtctacatcgatgaaatcgacaagatttctcgtaagtcagacaacccgtccattacccgagacgtttccggtgaaggcgtacagcaggcactgttgaaactgatcgaaggtacggtagctgctgttccaccgcaaggtgggcgtaaacatccgcagcaggaattcttgcaggttgatacctctaagatcctgtttatttgtggcggtgcgtttgccggtctggataaagtgatttcccaccgtgtagaaaccggctccggcattggttttggcgcgacggtaaaagcgaagtccgacaaagcaagcgaaggcgagctgctggcgcaggttgaaccggaagatctgatcaagtttggtcttatccctgagtttattggtcgtctgccggttgtcgcaacgttgaatgaactgagcgaagaagctctgattcagatcctcaaagagccgaaaaacgccctgaccaagcagtatcaggcgctgtttaatctggaaggcgtggatctggaattccgtgacgaggcgctggatgctatcgctaagaaagcgatggcgcgtaaaaccggtgcccgtggcctgcgttccatcgtagaagccgcactgctcgataccatgtacgatctgccgtccatggaagacgtcgaaaaagtggttatcgacgagtcggtaattgatggtcaaagcaaaccgttgctgatttatggcaagccggaagcgcaacaggcatctggtgaataattaaccattcccatacaattagttaaccaaaaaggggggattttatctcccctttaatttttcctctattctcggcgttgaatgtgggggaaacatccccatatactgacgtacatgttaatagatggcgtgaagcacagtcgtgtcatctgattacctggcggaaattaaactaagagagagctctatgaatcctgagcgttctgaacgcattgaaatccccgtattgccgctgcgcgatgtggtggtttatccgcacatggtcatccccttatttgtcgggcgggaaaaatctatccgttgtctggaagcggcgatggaccatgataaaaaaattatgctggtcgcgcagaaagaagcttcaacggatgagccgggtgtaaacgatcttttcaccgtcgggaccgtggcctctatattgcagatgctgaaactgcctgacggcaccgtcaaagtgctggtcgaggggttacagcgcgcgcgtatttctgcgctctctgacaatggcgaacacttttctgcgaaggcggagtatctggagtcgccgaccattgatgagcgggaacaggaagtgctggtgcgtactgcaatcagccagttcgaaggctacatcaagctgaacaaaaaaatcccaccagaagtgctgacgtcgctgaatagcatcgacgatccggcgcgtctggcggataccattgctgcacatatgccgctgaaactggctgacaaacagtctgttctggagatgtccgacgttaacgaacgtctggaatatctgatggcaatgatggaatcggaaatcgatctgctgcaggttgagaaacgcattcgcaaccgcgttaaaaagcagatggagaaatcccagcgtgagtactatctgaacgagcaaatgaaagctattcagaaagaactcggtgaaatggacgacgcgccggacgaaaacgaagccctgaagcgcaaaatcgacgcggcgaagatgccgaaagaggcaaaagagaaagcggaagcagagttgcagaagctgaaaatgatgtctccgatgtcggcagaagcgaccgtagtgcgtggttatatcgactggatggtacaggtgccgtggaatgcgcgtagcaaggtcaaaaaagacctgcgtcaggcgcaggaaatccttgataccgaccattatggtctggagcgcgtgaaagatcgaatccttgagtatcttgcggttcaaagccgtgtcaacaaaatcaagggaccgatcctctgcctggtagggccgccgggggtaggtaaaacctctcttggtcagtccattgccaaagccaccgggcgtaaatatgtccgtatggcgctgggcggcgtgcgtgatgaagcggaaatccgtggtcaccgccgtacttacatcggttctatgccgggtaaactgatccagaaaatggcgaaagtgggcgtgaaaaacccgctgttcctgctcgatgagatcgacaaaatgtcttctgacatgcgtggcgatccggcctctgcactgcttgaagtgctggatccagagcagaacgtagcgttcagcgaccactacctggaagtggattacgatctcagcgacgtgatgtttgtcgcgacgtcgaactccatgaacattccggcaccgctgctggatcgtatggaagtgattcgcctctccggttataccgaagatgaaaaactgaacatcgccaaacgtcacctgctgccgaagcagattgaacgtaatgcactgaaaaaaggtgagctgaccgtcgacgatagcgccattatcggcattattcgttactacacccgtgaggcgggcgtgcgtggtctggagcgtgaaatctccaaactgtgtcgcaaagcggttaagcagttactgctcgataagtcattaaaacatatcgaaattaacggcgataacctgcatgactatctcggtgttcagcgtttcgactatggtcgcgcggataacgaaaaccgtgtcggtcaggtaaccggtctggcgtggacggaagtgggcggtgacttgctgaccattgaaaccgcatgtgttccgggtaaaggcaaactgacctataccggttcgctcggcgaagtgatgcaggagtccattcaggcggcgttaacggtggttcgtgcgcgtgcggaaaaactggggatcaaccctgatttttacgaaaaacgtgacatccacgtccacgtaccggaaggtgcgacgccgaaagatggtccgagtgccggtattgctatgtgcaccgcgctggtttcttgcctgaccggtaacccggttcgtgccgatgtggcaatgaccggtgagatcactctgcgtggtcaggtactgccgatcggtggtttgaaagaaaaactcctggcagcgcatcgcggcgggattaaaacagtgctaattccgttcgaaaataaacgcgatctggaagagattcctgacaacgtaattgccgatctggacattcatcctgtgaagcgcattgaggaagttctgactctggcgctgcaaaatgaaccgtctggtatgcaggttgtgactgcaaaatagtgacctcgcgcaaaatgcactaataaaaacagggctggcaggctaattcgggcttgccagcctttttttgtctcgctaagttagatggcggatcgggcttgcccttattaaggggtgttgtaaggggatggctggcctgatataactgctgcgcgttcgtaccttgaaggattcaagtgcgatataaattataaagaggaagagaagagtgaataaatctcaattgatcgacaagattgctgcaggggctgatatctctaaagctgcggctggccgtgcgttagatgctattattgcttccgtaactgaatctctgaaagaaggggatgatgtagcactggtaggttttggtacttttgccgttaaagagcgtgctgcccgtactggccgcaacccgcagaccggtaaagagatcaccatcgctgctgctaaagtaccgagcttccgtgcaggtaaagcactgaaagacgcggtaaactaagcgttgtccccagtggggatgtgacgaagttcaagggcgcatctactgatgtgccttttttatttgtattcggtgactttctgcgtcttgtgggctgacaattgcccccgtttcttgtcacaataggcctttgcgcgcatcgatacgttgcgtgaggtacacagtcatctacagcggagtgttgttacaccatgatggacagcttacgcacggctgcaaacagtctcgtgctcaagattattttcggtatcattatcgtgtcgttcatattgaccggcgtgagtggttacctgattggcggaggcaataactacgccgcaaaagtgaatgaccaggaaatcagccgtgggcaattcgagaacgccttcaacagcgagcgtaatcgcatgcagcaacagctgggcgatcaatactccgagctggcagcgaacgaaggctatatgaaaaccctgcgtcaacaggtgctgaatcgtctgatcgacgaggcgctgctggatcagtacgcacgtgagctgaaactgggtatcagcgatgagcaggttaaacaggcgattttcgcgaccccagccttccaggttgacggcaaatttgataacagccgctataacggtatcctcaaccagatggggatgaccgccgatcagtacgcccaggcgctgcgtaaccagctcactacccaacagctgattaacggcgttgccggtaccgattttatgctgaaaggtgaaaccgacgagctggcggcactggtcgcgcaacaacgcgtggtgcgtgaggcgactatcgatgttaacgcgctggcggcgaagcagcctgtgaccgaacaggagattgccagctactacgaacaaaacaaaaacaatttcatgacgccggaacaattccgcgtgagttacatcaagctggatgccgcaacgatgcagcaaccggttagcgatgcggatatccagagctactacgaccagcatcaggatcaattcacccagccgcagcgtacccgctacagcatcatccagaccaaaactgaagatgaagcgaaagcggtacttgatgagctgaataaaggcggtgattttgctgcattagccaaagaaaaatctgccgatattatctctgctcgtaacggcggcgatatgggttggttagaagatgccactatcccggacgaactgaaaaatgctggtctgaaagaaaaaggccaactgtctggtgtcatcaaatcttcggtcggtttcctgattgtacgtctggacgacattcagccagcgaaagtgaaatcgttagacgaagtacgtgacgacattgcggcgaaagtgaaacacgaaaaagccctcgatgcgtactacgcgctgcagcagaaagtgagcgatgcggcaagcaacgacaccgagtctctggccggtgcagagcaagctgccggcgttaaagccactcagacgggttggttcagcaaagataacctgccggaagagttgaacttcaagccggttgccgacgctatctttaacggcggtctggtaggtgaaaacggcgcgccgggcatcaactctgacatcatcaccgtagacggcgaccgcgcattcgtgctgcgcatcagcgagcacaaaccggaagcggtgaaaccgttggcagatgttcaggaacaagttaaggcattggttcagcacaacaaagctgaacaacaggcgaaagtggatgctgagaaactgctggttgatttgaaagccggcaaaggtgcggaagctatgcaggctgccggtctgaaatttggcgagccgaaaaccttaagccgttccggtcgtgacccgattagccaggcggcgtttgcactgccactgccagcgaaagacaaaccgagctacggtatggcgaccgatatgcaaggtaatgtggttctgctggcgctggatgaagtgaaacaaggttcaatgccggaagatcagaaaaaagcgatggtgcagggtatcacccagaacaacgcacaaatcgtctttgaagctctgatgagtaacctgcgtaaagaggcgaaaatcaaaattggcgatgcgctggaacagcaataatcctgaagccgcctcgcaaaaaaatgcgttgcagctgtaacaagaaaaggtcgctttcgcggccttttccatttctgaacattgccatttgtttactgttttcactgccgttaaggtgattccactgttaacaaacaaggagaaaacagtatgaaacacggaattaaagcactgctcattaccctgtccctggcctgtgccggaatgtctcatagcgcgctggcggcagcttctgtggcgaaaccgacggcggtagaaaccaaagcggaagctcctgcagcacaaagtaaagcagcagtaccggcgaaagccagtgacgaagaaggcacccgggtcagcattaataatgccagcgcggaagagctagcccgcgcgatgaatggcgttggcctgaagaaagcgcaggcgattgtcagttatcgcgaagagtacggtccgtttaaaactgtggaggatctaaagcaggtgccggggatgggcaattcgctggtggaacgtaatctggcggtattaaccctgtaattaatttgcatagtggcaattttttgccagactgaagaggtcataccagttatgacctctgtacttataacaacaacgtaaggttattgcgctatgcaaacacaaatcaaagttcgtggatatcatctcgacgtttaccagcacgtcaacaacgcccgctaccttgaatttctcgaagaagcccgctgggatgggttggaaaatagcgacagttttcagtggatgacggcccataacatcgccttcgtcgtggtcaatatcaatattaactatcgtcgcccagcggtattaagtgacctgttaactattaccagtcagttgcagcaattaaacggtaaaagcggcatcttaagccaggtcattacactggagccggaagggcaggtggtagcggatgcgcttattacgtttgtttgtattgatcttaaaacgcagaaagcattagctctggaaggggaattgcgcgaaaagctggagcagatggttaagtaaacgttttgtggtgccggatgctcaagccgcatccggcgacacccggaataattacctcaacccggttttctgcttcatcgctgccatcaccgtcggtttatcggccagataatgattcaaaccgttggcgcgtaaattacatgccgcacaatgaccgcaaccgtcgcctttaaagccgttatagcaggtcaacgtttcgttacggactaaatccagtttgccgtaataatctgccagcgcccaggtttccgctttatcaatccacatcagcggcgtttcaaaacgaatatctttcgccatgcccaaactgacggcatggtttagtgctttcacaaactcatcgcggcaatccgggtagccggagaaatccgtttcgcagacgccagtaattacggcttctgcttttacctgatacgcatatattgccgccagcgtcaggaacaaaatattacgccctgggacaaacgtattcgggataccatcggcttcaggttcataatcaggcaccggaatgctgtcacgcgtcaggctactgaccgccagctcgttgagcagggtgacatccagcaccttatgcgcgcgtgcccccagtttcagcgccagttcgcgtgccacgtcgatttctgcgcgatgccgctgaccgtaatcgaacgtcacgcaatggacttcatcatattgttgtaatgcctgcaccagacaggtggtggaatcctgacctccactgaacacaacgacagcacgtttcatagataatcctgcttgaacaataaaagcgttatggtaacgcctgcgattaacccggaccagctattcattgcgatggcgcgggaagccaggcttcggtaaattcaaaccagccgcgcggtgtcagtcgcacaccgttcacgccgggaggggcactaatgcgatagtgatagttgaacagcggcgtcagcgtcgcatctgtcattaactggctaaaaaccgctttcagggcattaaatcggttttcttcatcaggcattatttgcacggcatccagtgtcgattgtagatgtgcgtatgctggagcgtcgaaaacatgtggccacagcggatcgcagcgcagccattgctccagagtatattccggtgcttcgccaattaatctgtcgcccatcatgaggtctgcgtgtgcctgtagggtcgtgtcgtcccagttttttgcgttatgaaaaataattgtgagttcacagccttccgctgccagtgtcgcctgtaggcgttctgccatggtatgaagttctatcggtaggtgataaaccagcgtcaaggttttcggtagtttgacttcatccggtacctgccaatgcggaatagtccagcctggcagtaatgcatgactggcggtgatcaggttttctccgacttctaacgtttgtaataaaccggattgatgaataatggagatcacttttcgcgcctgccagagggagagtcggggacttttgcgcaacgtcaaatagcaaaaacctaaactgatgccgctactgacctggctgacccgttgcagctcctccggtttgccgatggtgatttgcacgggatgccgacaactggttcccaaatctttttcgaaaagcggcggagttatccagtactcaaccgctttaagcagcggatgacgtaaatggtaataatcatggctttccaggcgcaccagctctgctgtgaattgtgttaagcgaaaaggacccgtgccgatcagtgggaattgcggatgcgccagatggctgcaatagctcgccagccggtgcgcaagccagtaatcagggcgatgtaaaaagaaggtcagacactgcggatgggtgacttcaatacgcttcacgctaataaataattgatccagtgctggcagttgtaacagcatcaataatcgctggtgtaagtgtgaggcttttactgcatcgccgttatgccagtgtagggttgaacgaagataaaagtcccagcgtaacccgtcagtagaggtttcccagtgatgcgctaaatcgccaatcgggcgctgagtattattatcgaagcgggtcaggccggaaaatatctgcccggcgagatgctgctcggcacggccgggcaaaaagcctggttgtagcggttcgagcgggcgatagtagggaatacgcaacgtgggtgtatcgttttgccattgtccgcccataaacggctgtaacagagtgcgcagctcacctggggccagttgcgccagctccagcacatcttgctgctttccggtttccagtgcctgttccatcatcgcattgcgtagcgattccggcgtgaccagaaagcgtaattgtccgcgctttccgcgtcctgactgcgcctgccactccagccatcccgcctcctgtgcctgacgcaacagcgtacgaacatggcgttcgctgcaaaaacagcgttcggccagttcgctgacggtgacggtttgcggctttccggcggaaggttgccacagacgttgatactggttaagacggttgagcaatcgcatataaacccggaacaatattatttaactattcactattacttccgtatatatcaggtgatactcaatcaccattaaccgtgtcacagagtggagaaagaaatggctcgtctggcagcatttgatatggatggcactttattgatgcccgaccatcatttaggtgagaaaaccctctctactttggcgcgactgcgtgaacgcgacattaccctcacttttgccacggggcgtcatgcgctggagatgcagcatattctcggggcgctatcgctggatgcgtatttgattaccggcaacggaacgcgcgtgcattctctggaaggtgaacttttacatcgtgatgatttacctgcggatgtcgcggagctggtgctgtatcagcaatgggatacccgagccagcatgcatatcttcaatgacgacggttggtttaccgggaaagagatccctgcgttgttgcaggcatttgtctatagcggttttcgttatcagataatcgatgtcaaaaaaatgccactcggcagcgtcaccaagatctgcttctgtggcgatcacgacgatcttacacgcttgcagatccagctatacgaagcattaggcgagcgtgcacatttgtgtttttccgccacggattgcctcgaagtgctgccggtgggctgcaataaaggcgctgcattgacggtgctgacccaacatttaggtttatcgttgcgcgattgcatggcctttggtgatgcgatgaacgatcgcgaaatgttagtcagcgtcggtagcggatttattatgggcaatgcgatgccgcaactgcgcgcggagctcccgcatttaccggtgattggacattgccgaaatcaggctgtctctcactatttgacgcactggctggactatccacatctaccttattcccccgaataacgagatcccttccagcaccgggcaattgcccggttttttttgcgttgaatttgtcattttgtgccgtggtgtttaaaccgcacagaataaattgtcgtgatttcacctttaaaataaaattaaaagagaaaaaaattctctgtggaagggctatgttagataaaattgaccgtaagctgctggccttactgcagcaggattgcaccctctctttgcaggcactggctgaagccgttaatctgacaaccaccccttgctggaagcgcctgaaacggctggaggacgacggtatccttatcggcaaagtcgccctgctggatccggaaaaaataggcctcggcctgaccgcttttgtgctgataaaaacgcaacatcacagcagcgaatggtattgccgctttgtcacggtggttaccgaaatgccagaagtgctggggttctggcgcatggctggtgaatacgattatctgatgcgcgtccaggttgccgacatgaaacgctacgacgagttttataagcgtctggtaaacagcgtgccggggctgtcggacgtcacttccagcttcgcgatggaacagattaaatacaccacttctttacccatcgaataaatatccagaatcaggtcaggacacaacgcgtgcgattatttgctcaattaagctggtatttccgtcgggaatggcgtcgctatctcggggctgtcgccttgcttgtcattatcgcgatgctgcaactggttccgccaaaagtggttggtattgttgtcgatggcgtgacagaacaacactttactaccgggcagatcctgatgtggatcgccaccatggtgctgattgccgttgtggtttatctcctgcgttacgtctggcgggtattgctgtttggtgcgtcttatcaactggctgttgaactgcgtgaagattattaccgtcagctaagccggcagcatcctgagttttacctgcgtcatcgcaccggtgacctcatggctcgtgcgaccaatgacgtcgatcgcgtcgtgtttgccgccggagaaggggtgctgacgctggtggattcactggtgatgggctgcgctgtgttgattatgatgtctacgcaaattagctggcagttgaccttattttccctgttgccgatgccagtgatggcgatcatgattaagcgcaacggcgatgctttgcatgaacgctttaagctggcacaggcggcgttttccagtcttaatgaccgcacccaggaaagcctcaccagtatccgcatgatcaaagcctttggtctggaagatcgccagtcggcgttatttgccgcggatgccgaagataccggcaaaaaaaacatgcgggtggcgcgtattgatgctcgtttcgacccgaccatctatatcgcgattggtatggcgaacttgctggcgattggcggcggtagttggatggtggtgcagggcagtttaacgctgggccagctcaccagttttatgatgtatttaggtctgatgatttggccaatgctggcgctggcatggatgtttaacattgtggaacgtggtagtgctgcgtacagccgtattcgcgcgatgctggcggaagcgccggtggtgaacgatggtagcgaacccgtgccggaagggcgtggcgaactggatgtaaatattcaccagttcacgtatccgcagactgaccatcctgcgctggaaaacgtcaatttcgccctgaaacccggtcagatgctgggtatctgcgggccgactggttccggcaaaagtaccctgttgtcgctcattcagcgtcatttcgacgtcagcgagggggatattcgctttcatgatattcctctgacgaagttacaactcgatagctggcgtagccgcctggcggtagttagccagacgccattccttttttctgacactgtggcgaataacatcgcgctgggttgcccgaatgccacccagcaagagattgagcatgtcgcgcggttagccagcgtacatgacgatattttgcgtctaccgcaaggttacgatacagaggtgggcgagcgcggtgtgatgctttccggcgggcaaaaacagcgtatctccattgctcgtgcgttattagtcaacgcggaaatcctcatccttgatgatgcgctttcggcggtggacggacgcactgagcaccagatcctgcataacctgcgtcagtgggggcagggaagaacggtaatcatcagtgcccatcgcctttctgcactgacggaagccagtgaaattattgtgatgcagcacggacatatcgcccagcgtggcaatcatgatgtgctggcacaacaaagcggctggtatcgcgatatgtatcgctatcaacaactggaggcggcgctcgacgacgctccggaaaatcgcgaggaggccgtcgatgcgtagttttagccaactgtggccgactctcaagcgcctgttagcgtacggttcgccgtggcgtaaaccgctggggattgcggtcctgatgatgtgggttgcggcggcggcagaagtcagtgggccgctgcttatcagctattttatcgacaatatggtagcgaaaaataacctgccgttgaaagtggttgcagggctggctgcggcgtatgttgggctgcaactgtttgccgccgggctacattacgcgcagtcgctgctgtttaatcgggcggcagtaggcgtagtgcaacagttgcgtaccgacgtgatggatgctgcgttacgccagccattaagcgagtttgatacccaacccgtcgggcaggtgatttcccgcgtcactaatgacactgaagtgatccgcgatctctacgttaccgtagtggcaactgtcctgcgcagtgccgcgctggtgggcgcgatgctggtggcgatgttcagcctcgactggcgaatggcactggtggcgataatgattttcccggtggtgctggtggtaatggtgatataccagcgttacagcacgccgattgtccgtcgtgtgcgcgcctatttggcggatatcaacgacggctttaacgaaatcatcaatggcatgagcgttatccagcagtttcgtcagcaggcgcgatttggcgaacgtatgggggaggccagtcgttcacactatatggcgaggatgcaaaccctgcgcctcgacggttttctgctgcgtccgctgctgagtctgttttcatcgctcattctttgtggcttgttgatgctgtttggcttctccgccagcggcaccattgaagtgggcgtgctgtatgcgtttatcagctatcttgggcgacttaacgaaccattaatcgaactgaccacgcaacaggcgatgctgcaacaggctgttgttgctggtgagcgcgtgtttgaactgatggacggaccgcgccagcaatatggcaatgatgatcgcccgttacagagtggcaccatcgaagtcgataacgtgtcatttgcttatcgcgatgacaatctggtgctaaagaacattaatctctctgtgccttcgcgcaattttgtggcgctggtcgggcataccggcagtggcaaaagcaccctcgccagtttattgatgggctattacccgctaacggaaggtgagattcgccttgatggtcgtccattaagttcgctaagtcacagcgcgctgcgccagggcgtggcaatggtgcagcaagatccggtggtgctggcggataccttcctcgccaacgtgacgctggggcgggatatctccgaagaacgcgtctggcaggcgctggaaaccgtgcaactggcggagctggcgcgtagcatgagcgacggtatttacacgccgctgggcgagcaggggaataatctctcagttgggcaaaagcaactgctggcactggcgcgcgtgctggtcgagacgccgcaaatcctgatccttgatgaggcaaccgccagcattgactccggtactgaacaggcgattcaacatgctctggcggcggtgcgtgaacataccacgctggtagtgattgctcaccgcttatcgaccattgttgatgccgacaccattctggtgcttcatcgtgggcaagccgtggagcagggcactcaccagcaactgctggcggcccagggacgctactggcagatgtatcaactgcaacttgcgggcgaagagctggcagccagcgtgcgtgaagaggaatcattgagcgcctgaatagcgcaatatttcatcgttggtgcaaaaatgtaacgcactgtgcactgtcatagtgcgttttcattttcaaacttcttaacttcctgctctctttctcgtttttcatttctggcacaccgcttgcaataccttcttcgtgtagcagaaccattaccgaattctgaccggaggggatctatgaagctggtgaccgtgataatcaaaccattcaagctggaagacgttcgtgaagcgttatcttccattggtattcagggcctgaccgtcaccgaagtgaaaggtttcgggcgtcagaaagggcatgccgagctgtaccggggggcggaatacagcgtcaatttcctgccaaaagtaaaaattgatgtggcgattgctgatgaccaactcgatgaagtgatcgatatcgtcagtaaggcggcttacaccggaaaaattggcgacggcaaaatcttcgtcgctgaattgcaacgcgtcattcgtattcgtaccggcgaagccgacgaagcggcgctgtaatctctggcacacagcaacaggaacgaaaaatgaagatagcgacgataaaaactgggcttgcttcactggcgatgcttccgggactggtaatggctgcacctgcggtggccgataaagccgacaatgcgtttatgatgatttgtactgcgctggtgctgtttatgactattccggggattgccctgttttacggtgggttgattcgcggcaaaaacgtgctgtcgatgctgacgcaggtgacggtgacatttgcactggtctgtattctctgggtggtttacggttactcgctggcgtttggtgagggcaacaacttcttcggcaacattaactggttgatgctgaaaaacatcgaactgacggcggtgatgggcagcatttatcagtatatccacgtggcgtttcagggatcgtttgcctgcattaccgtcggcttgatagttggggcgctggcggaacgaatccgcttctcagctgtgttgattttcgtggtggtatggctgacgctctcttacattccgattgcgcatatggtgtggggcggtggtttgctggcttctcacggtgcgctggatttcgcgggtggcaccgtggtgcacattaacgccgcaatcgccggtctggtgggcgcgtatctgataggaaaacgcgtgggcttcggtaaagaggcgtttaaaccgcacaacctgccgatggtcttcaccgggactgccattctctatatcggttggtttggctttaacgccgggtcagcgggcacggcgaatgaaatcgcggcactggcatttgtgaatactgtggtcgcaacggcggcggcaattcttggctggatcttcggtgaatgggcgctgcgtggtaagccttcactgctgggggcgtgttctggcgcgattgccggtctggtcggcgtgacgccagcctgcggctacattggggttggcggcgcgttgattatcggcgtggtagctggtctggcgggcttgtggggcgttaccatgctcaaacgcttgctgcgggtggatgatccctgcgatgtcttcggtgtgcacggcgtttgtggcattgtcggctgtatcatgaccgggatttttgccgccagctcgctgggcggcgtgggcttcgctgaaggtgtgacgatgggccatcagttgctggtacagctggaaagcatcgccattacgatcgtctggtccggtgttgtggcatttatcggctacaaattggcggatctgacggttggtctgcgtgtaccggaagagcaggagcgagaagggctggatgtcaacagccacggcgagaatgcctataacgcgtaacaagcactgcaaaaaacagccggacggttttcacctccggctatttttttaattgtgattacgcatcaccccttcctgaacggtcgaggcaaccagtacgccgtcttgggtataaaactcaccgcgcacaaagccacgtgcgctggacgccgaggtgctctccacgctatacagcagccattcattcaaattaaacgggcgatggaaccacatggaatggtcaatggtggcaatctgaatccccggttcgagaaaaccgatgccgtgcggctgtagagctaccggcaggaagttaagatcagaagcgtaaccgagcagatactgatgaacgcgcaggtcatccggcacgctaccatttgcgcggatccacacctgacgatgtggttctgcgacgtgacctttcagtgggttatgaaactccaccggacggacttccagcggacgatcgcagatgaatttatctttcagcactggcggcagcaggtgcgccagcgattgggcgatttgcgtttccgaagggaggccatcaggcgctggcgcggacggcattgttttttgatgttcgaaacccgcttctggtgcctggaaagaggcagtcatataaaaaatcggtttgccgttttgaatagcagcaacccggcgggcgctgaagctgttaccgtcacgcagcgtttcgacatcataaataatcggcttcttactatcgccagggcgaagaaagtagctgtgaaacgaatgtaccagccgctcttcagggacggtctcttttgcagcatacaaggcctgacccacgacctggccgccaaacacctggcgtaaacctaaatcttcactctggccgcgaaagagtccttcctcaattttttccagatttaacaatgtcagtaaattttttagcgcctgactcatataactctccagtaacaaagctgccgcagcaagccaaagtgagttgagtataacgcaaatttgctactggtccgatgggtgcaatggtctgaattacgggctaattacaggcagaaatgcgtgatgtgtgccacacttgttgacgttactattttgttaaccactcttccggcgaggaaagttagcccgctggtgcattgataataaggagaaatgaatgaaactcgtgcacatggccagtggtttagcggttgcgattgcgttggcggcttgcgcagataaaagcgcggatattcagacgccagcaccggctgcaaatacgtctatttcagcaacacaacaaccagctatccagcaaccgaatgtctccggtaccgtctggatccgtcagaaagtcgcactgccgcctgatgctgtgctgaccgtgacactttctgacgcgtcgttagccgatgcaccgtcaaaagtgctggcgcagaaagcggtgcgtactgaaggtaaacagtcaccattcagctttgttctgtcatttaacccggcagatgttcagccgaacgcgcgtattctgttgagtgcggcgattaccgtgaatgacaaactggtatttatcaccgataccgttcagccggtgatcaaccagggcggaactaaagccgacctgacattggtgccggtacagcaaaccgccgtgccggttcaggccagcggtggcgcaacgactaccgtaccttcgacttcaccaactcaggtgaatccgtcttcggcagttccagctcctacgcaatattaagcgacgttaaccctctccgcccggagagggttagtagttccagcgataacgctgcaagtcgatttgcccgcttcccgataccatcacaccttctgccagtaatgcctgtcgctgacgctgtaaatccggtccggttagcgaaattgtgccgtggcgattaaccacccggtgccagggtaaggtgctgccttcagggagacgctttaacacaccgcccacctggcgcgcggcgcggggcgatcccgccagtttcgccacatcaccgtaagtggtgacatagccttcgggaatagcggcgacgatttgccagacgcgttggggaaatgaatcttctttttccatcttttcttcctgaggtaatttttcagcataatctggaaaaacgcccgagtgaagtcgcattgcgcaagaaaccagcatctggcacgcgatgggttgcaattagccggggcagcagtgataatgcgcctgcgcgttggttctcaacgctctcaatgggggctctgttggttctcccgcaacgctactctgtttaccaggtcaggtccggaaggaagcagccaaggcagatgacgcgtgtgccgggatgtagctggcagggcccccacccatttctgcctcccaccgtttcgtcaaaaaatcccaacatggctaaactttaaccacaactgacgtcgcaagaattgtctggctgcgcagtacgcttcggaggtatgtctgatgaagtatgttgatggttttgtggttgccgttcctgccgataaaaaggatgcctatcgggaaatggccgctaaggctgcgccattgtttaaagagtttggcgcgcttcgtattgtcgaatgctgggccagcgatgtaccggatggcaaagtgaccgattttcgtatggcggtgaaagcggaagagaatgaagaggttgtctttagctggattgaatacccttcaaaagaggtccgcgacgctgctaatcaaaagatgatgtcggacccacggatgaaagagttcggcgagtccatgccgtttgacggcaagcgaatgatctatggcggattcgagtcaatcatcgacgaataggtagcgtgacgggctgtgcggcgtgccgtcagcccaaaaattcacaaatgttgctcggcccagcgtaagaaatcttctttcggtaatgccttgctgtagagccagccctgaccgtagtgcacgccatgctggcgtaaccactcttcttgtttactggtttcgattccctccgctaccattttcagtttcagtgtttttgccatttcgatgatatgcggcgtgacatttttatattccagcgcatcaacgaaagatttatcgatcttcagaatgtcgacatccagatcctgtaaataacttaaacttgaataccccgtaccaaaatcatcaagataaatttcatggcccgcctcccggtagcgagaaattatcggggcgctggttttcggatcggcaaactcgcgttcagtgagttcaagcgcgatctgtctgggattaacctgatagtgattgatcatgtcacgcagcaattgcgggattttttccgaggtgagcacgggggattcaagattgatcgaaatatgctgctgtggatgctgacgcagccagtcgcccatatcttcaaagacgcttcttataatcagtagcgtcaatggctcagaaaggcccgtttgctgtgccagcggaataaaactatctggtgacaaccaactaccgtctgtctgcggccagcgcgccagtgcctcagcaccgacaattttgccattggctaaggagacaatcggctgatagtgcacgcaaatatcacgattttcgatagcatcctgcagccgatgatgcggtgactgaatacggcgcaaaatacgcagcacaaacatcgctgccagcaggccaatcaccaacccgagcggtaaccaaataaagacttgccgatgccagcctttctgcaacattttcgttgaagcccatgtgatgatcgaaatattcatctccggtaagggcaggatatcgtaaatgattccattattttcgatatgctcaccgggtgttttttgtagcctggtaataattccctgagcaatttcatcgctgctggttatgacaacgttatgggcattgccaataatggcggcatcaatttgccatgagctatagggaatgacatcaataaaggaagcggggtcgatcatgacgacataatgtgccgttcccatggcgaccatgtaacggataatgcctaaatcgttatgcgatgttaaccagacacgataaccatctttcgaaattttacctggctcggggaaggtatcgggcggactttcatgctccagagacgaacactggggaacgttgttatcgatataagccacttcctgaatatagcgataactgtaagatacccgacgcatttccatgagatgggcttcgctacaggcagcgccttgccatctttccagctcctgcagcgcatctttcccttgtgtcgccaccttattggctcgaatagcgacgcgggaggaataggtatccagctcttcaataaacgatgtttctacctgctgatgggccagccagatgcttaagccgacaggcagcaatactgaaagaatcagtactcccgaaataaggccgaccagatgtcgtgttctcaccagcatatccttattaacacagtgtagggaaagtatatctgattgtggaaaaaggctggctggagataaggaggtagagctggtatttcatgaagtgatgggtggaaacgatcattgtcatttgaccaggcgcagagctttacgcctggtatgtaaccctaacttaagatgttgattcggcgcgagcgagggtaaaaatatcgtaaaaagacagttcacctttacggacgatcattttttgcagttgttccttatgaacatccgcgacacgcggagagttcaagatggcttcaaccagcgcggcaggtacaaagcgcgtgttgtaccattcgccgttatagcaaacgcggaaatccagcacgtcgatatcttcatagcggtagcgtgggtagacatcgaaaaagaagaaaccattaagcaggataaataatacaaccagtagccagacagagcctgacagcgtttcggactgcaacatcaccgccagggtggcaaaaaaagcaacgtacataccgataaacagccccggatgtttacggataaaactgatactaaagcggggtttgttgtcgcgtttttcgcgggtattcagagactcaatcgtttcggtcagcaggcgttgtatttcggtcatcgtttgccttcgtggtatctgcaactttccagggaacaccctattttaacgtgggaatagtagaggggaagtaacagatctaccacaattttgcataacagttgcgaaaaaccgattacaattttttaattattctggctggattaccgcccacgacaacgttgtccgggacatcttttgtgacaactgcacctgaggctaccacgacgttatcaccaatggtcacaccagggttaatgaccgcgcgtccgccaatccagacgttattaccgatggtgacgggtttccccagttcagcaccgctattacgtgctacagggtcgatgggatgtgttgccgtgtagatatgaacgcctggtgccaacatacagttatcaccgatgcgaatagggcagacatcaagcatcacgcaatcgaagttggcgaaaaaattattaccgagaaaaatgttatagccatagtcacagcgaaacgttggctcaatataagcctctgtcacctgaccgaatagatcagcgagaatttgctggcgtaatgtgtgctcttccgccagggaatgattgtatcggtgaataagctgacgagcgcgcaggcgatcgcgagataacgtctcatctgccgagcgatacaactcaccagcaatcatcttttctttttctgtgctcattactgacctccggttgctgaaaatgcggcaacacagtaagacgaaaagtcagtgaagagaacgttcccattacatctgtgtgataaagatcacatagggtatgtcttcatggcgaaaaagtataaaattcttaataaacagccggttatagctccgaaagcgaattatttattagcgaataaatttccatactgaggaagggatcttgtcgtacagtttattcatggtcaattcggcgaggcggtgatctgcggctgagtaaaataccgccagttcattatctgataattcgtatttatttttctcgataacacgctccagcgtgtcaattgtctggcaacgacgtaaacgcattaaataatcggttttcgttaaaaatttttcggacatacttctacctatggttgtaataattctaacaagataaactcgcaggattctctttcgtcgcattgacaaaacaacggaatagtcgattacctgacttccgccatttctgaagatcctgcatattaataccataactactgaacaacataaaggtgtcatccagatattcgtcgatctgctcaatgagcttattgtcttcattatacttaattttgtaattaagtgcgaaggtcgcaatatgctcaatcagttcattcaactggaggttgatcgccgaggttgggtcgtttacccagccatgattgctttcttcaaggtttgcaaggcagtcatgatacagggtttcacagagaaacttaagctgtgcgatatcatgtcttttgggtgagtattcatccataacgcgtccccttcttagcggttgaactaacggacacctttcgggatggaaaaaacttactgacctggacttgccctctcgtttgttagcttaactataagccactctttgcaggttttcatcgcattattacgaaaaattacaattaggaaggaagcgggacaggactcactttttcatactagcactaacccgcagcaggtaaaagcagtttgctcgaactattcataacatttcaggattatcgccagatgaaattggtgacactaataccaggattgctctgaatatgacgtaataaccgaggaatgaataaagaattaccgcaaataattaagaatagcctctaaatgattatggattattaaatctattagcgctacttaatataaattaactaacaatcagtattttttatgaattttatccgtggttaatactggttttcgtatgagatcctgagttggtggttcaattactccttaatgttcgtaggttatgcataaaaaaggccgcttacgcggccttagtgattacacgttgtatcaatgatgatcgacagtatggctgtgctcgatatcttcattcttgcggctaaagcggcggcgaaccaccacaaagaataccggaacgaagaagattgccagtaccgttgcggtcaccatcccgcccattacaccggtacctactgcgttctgcgcgccggaaccagcaccagtactgataaccagcggcataacgccgaggataaacgccagcgaggtcatcaggatcggacgtaaacgcatccgcaccgcatcaagcgtcgcttcaatcagacctttaccttctttatccatcaagtctttggcgaattcgacgataaggatcgcgttcttcgccgacaacccaatggttgtgagcaggcctacctggaagtaaacgtcattggtcaggccacggaaggtggcagccagcaacgcaccgataacccccagcggaacgaccagcataacggagaacggaatcgaccagctctcgtacagcgccgccagacacaggaacacgacaatcaacgaaatcgcgtacagtgaaggtgcctggttgccggagagacgttcctgataggacatccccgtccagtcatagccaacaccggtaggcagtttgctcgccagttgttccatcagctccattgcttcaccggtacttttacccggtgccgcctggcctaagatttccatggatggcaggccgttgtaacgttccagacgcggcgaaccgtactcccaacgagaagaggagaacgccgagaatggcaccatctgaccatcagcagcacgaacataccagtcgccgatatcatccggcagcatacggtatttcgcttctgacatgacataaactttcttcacacgaccgcggtcgataaagtcgttcacatagctgccgccccatgcagcgcccagagtggtgttaatgtcgttgatagaaacacccagcgcctgcgctttttcctggtcgatatcaatcttaaactgcggggtatcttccagaccgtttggacgtacgctggtcaacatatcagggtgcttcgctgcttctgcaagcaactggttacgcgcctgagtcagtttttcgtgaccaaggccagcctggtcaatcagctcaaagtcaaagccggttgcagtacccagttccacgattgcgggcaggttaaaggcgaaaaccatcgcatctttgatttgcgagaaagcgcgtgttgcacgcatggtaatcgcttcaactttgttttcttcgcccggacgatcggcccagtccttcaaggaaacgaacgcaataccggtattctgaccacgtcccgcaaagccgaagccgttaacggcgaacaccgactcaacgttgttcttttctttggtcagatagtaatgcgttacctcattgagcactttctgtgtacgttcctgcgttgcacctgctggcagctgaaccatggtcataaacacgccctggtcctcatctggcaagaaggagcttggcagacgcacgaacagataggccatgccgaccacgatgatcagatacagcaccaggtaacgccccgtactgcgcagaataccgcctacgctgtcggtgtagtggtgcgtgctcttctcgaacatgcggttaaaccagccgaagaagccttttttaccttccccgtgatcgcctttggcaatcggtttcagcatggtggcacaaagagctggagtcaggatcaacgccaccagtaccgacagcgccattgctgaaacaatggtaatagagaactgacgatagatagcaccagtagaaccgccaaagaaggccatcggtacgaataccgccgacagtaccatcgcgataccgaccagagcgccctgaatctgccccatcgacttacgggtagcttcttttggcggcaaaccttcttccgccataacacgctcaacgttttctaccacaacgatggcgtcatccaccaacaggccgatggcgagcaccatcccgaacattgttagcgtgtttatcgagaagccaaaggcggcaaggacggcaaaggtcccgagcaataccaccggtacggcaatggtcggaatcaacgtcgcgcggaagttctgcaggaacagatacataaccaggaacacgaggatgatcgcttcgaccagcgttttaaccacttcgtgaatagagattttcacgaacggcgtggtgtcgtatgggtaaacaattttcagacccgacgggaagaacggttccatcttcgccagttcagcacggattgccgcagcggtatccagcgcgtttgcaccggtcgccagcttgatccccagaccggaagccggttggccgttaaactctgcgatgatgtcgtagttctcaccacccagctcaatcttcgcgacgtcacgcagcagcacgcgggaaccatcctgattcactttcagcaggattttgccgaactcttcagtagaggtcagacgcgtctgagcaataatagaggcgttaagctgttggcctttcaccggcggcgtaccaccgagctgacccgccgcaacctgggcgttctgcgctttgatggcggtaatgacatcaaccggcgttagctggaatttgttcagctcattcgggttcatccagatacgcatcgcgtactgtgaaccgaacaactgaacatcacccacgcccgacgtacggctgatggcatctttcatattcgccgccacgtagtcggagatatcctcctgcgtcatggtgccatcggtgttgataacgccgacaaccatcaggaagctgctggatgatttctcaacgctcaccccttgctgctgaacttcttgcggcagcaacggcatcgccagctgcagtttgttctgcacctgaacctgcgcgatatccgcatcagtaccagactcaaaggtcagggtgatctgcacggtacccgtggagtcactgttagaggacatgtacatcaggttatcgataccgttcatattctgttcgataacctgtgtcaccgtgtcctgcactgttttcgcatcagcgccggggtaggaggcggagatcgttactgccggcggtgcaatcgtaggatattgcgccaccggcagtttgaggatcgccagcccccctgccaacatgatgataatggcgatcacccacgcaaaaatcgggcgatcgataaagaaattaggcatgtcttaacggctcctgtttaagttaagacttggactgttcaggctgagcaccgcttgcggcttgctggttattatcagcggtaacttcttgtgcttttacctggacaccaggacgcactttctgcagcccacttattactacgcgatcgcctgctttcagaccttctgtcaccagccacttatcgccaatagcctggcttgcaacgatcggacgggtttccactttgtcatccgcgccaactaccagtacggtggcatcgccacgcggcgtacgggttacgccctgttgcgggactaaaatagcgtttggattaagcccttcttccagacgtgcgcgcacgaacatacccggcagcagagtgtgatccgggttcgggaagatagcgcgtagggtgatagacccagtggtctgatcaacggtaacgtcagagaattccagcgtaccgtcctgcgggaacttaatgccgtcactggtgatcagtgacactttggctttgccgttctcttgtttcagcgtgccattcgccagttcctgtttcaggcgcaggaagtcgttgctggactgggtcacatcaacgtagatcggatcaagttgctgcacggttgccagcgcagtcgcctgaccgttctgtaccaatgcgccttccgtcacgttcgacttaccaatgcgaccgctaatcggagaggtgactttggtgtaagccagattgatccgcgcagtttcaacggcagctttcgccgcagttaccgcagcattcgcctgttgcgcatcagccagagcctgatcgtactcttgcttactgatgtactgagtaccgagcagtttctgataacgattcaccgtcaattgcgcgatattggctgcagcctgggctttcgccagatcacctttcgcactgtcgtatgtcgcctgataggtcgcaggatcaatctgatagagagagacacctgcttcgatgtcgctaccttctttgaaattacgcttcaggataatcccgctaacttgaggacgaacttctgcgatccggtaggcactggtgcgacccggaagctcggttgtgatctgcagaggttcagttttgactgttactacgccaacggcgggcatctgctggccaccttgttgggcctgtttgtcgtcacatcctgttagggctaagctgcctgagagcatcagaacgaccgccagaggcgtaaaccctctgtttttgttcatatgtaaacctcgagtgtccgatttcaaattggtcaatggtcaaaagttaataaacccattgctgcgtttatattatcgtcgtgctatggtacatacattcacaaatgtatgtaaatctaacgcctgtaaattcacgaacatatggcacgaaaaaccaaacaagaagcgcaagaaacgcgccaacacatcctcgatgtggctctacgtcttttctcacagcagggggtatcatccacctcgctgggcgagattgcaaaagcagctggcgttacgcgcggtgcaatctactggcattttaaagacaagtcggatttgttcagtgagatctgggaactgtcagaatccaatattggtgaactagagcttgagtatcaggcaaaattccctggcgatccactctcagtattaagagagatattaattcatgttcttgaatccacggtgacagaagaacggcgtcgattattgatggagattatattccacaaatgcgaatttgtcggagaaatggctgttgtgcaacaggcacaacgtaatctctgtctggaaagttatgaccgtatagaacaaacgttaaaacattgtattgaagcgaaaatgttgcctgcggatttaatgacgcgtcgcgcagcaattattatgcgcggctatatttccggcctgatggaaaactggctctttgccccgcaatcttttgatcttaaaaaagaagcccgcgattacgttgccatcttactggagatgtatctcctgtgccccacgcttcgtaatcctgccactaacgaataaccctgaatctgactccaggatttttcctggacattttcgtcgttgctattctggttcactgcgtcgtgatattcttgcggtttgactttttcaggtcgttcttcaggttcagaaaccttcattcatcatgactatgttccagtattacaaacgatcacggcattttgttttttcagcatttattgcttttgtttttgtcttgttatgccagaacacggcgtttgcgcgggcgtcatcgaatggtgatctgccgacaaaagcggacctgcaggcgcaacttgactcactaaataaacaaaaagatctttctgctcaggacaaactggtgcagcaggatctgacagatacattagccaccctcgataaaatcgatcgcataaaagaagagacagttcagctacggcaaaaagtcgctgaagcgccggaaaaaatgcgccaggcgaccgcggcgttaacagcacttagcgatgtcgataacgacgaagaaacgcgcaaaattctgagcacgctgtcgttgcgccagctggaaactcgcgttgcccaggcgctggacgatttgcaaaacgcacaaaacgatctggcgtcttataacagccagctggtttcgttacagacgcagcccgaacgcgtgcaaaatgcgatgtataacgcttcgcagcagctgcaacaaattcgcagtcgtctggatgggactgatgtcggcgagacagccttacgtcccagccagaaagtgttaatgcaggcccagcaggcgttgctgaatgcggagattgaccagcagcgtaaaagcctggaagggaacaccgtcttgcaggataccttgcaaaagcaacgtgattacgtgacggcgaacagcgctcgtctggagcaccagttacaactgttgcaagaagcggtaaacagcaagcgcctgactttaaccgaaaaaacggcgcaggaagccgtctccccggatgaagccgcgcgtattcaggctaatccgctggtgaagcaggaactggaaattaaccagcagttaagtcagcgtctgattaccgcgactgaaaacggtaatcagttgatgcagcaaaacattaaagtcaaaaactggctggagcgggcgctgcaatcggaacgcaatattaaagagcagattgccgtcctgaagggcagcctgctgttgtctcgtatcctttaccagcaacaacaaacgctgccctcggcggatgaactggaaaacatgaccaaccgcatcgcggatttgcgtctcgaacagtttgaagttaaccagcagcgtgatgcactcttccagagcgatgcgttcgtcaacaaactggaagaaggtcacaccaacgaagtcaacagcgaagttcacgatgcgttattgcaagtggttgatatgcgtcgcgaattgctggatcaactcaacaaacagttgggtaaccagctgatgatggccattaacctgcaaatcaaccagcagcagttaatgagtgtgtcgaaaaacctgaaatccatcctgactcagcaaatcttttgggtgaacagtaaccgtccaatggactgggactggatcaaagcgttcccgcaaagcctgaaagatgaatttaagtcgatgaaaatcacggtgaactggcaaaaagcctggcccgccgtttttatcgctttcctcgctggtttgccgctgctgttgattgccgggctgatccactggcgtctgggctggctgaaagcgtatcaacaaaaactggcttccgctgtgggttccctgcgtaacgacagccagctcaacacaccaaaagcgatccttatcgacctgatccgtgcgctgccggtgtgcctgattattctcgcggttggcctgattctgttgaccatgcagctcaacatcagcgaactgctatggtcgttcagcaaaaaactggcgatattctggctggtgtttggcctgtgctggaaggtactggagaaaaacggcgttgccgtacgtcacttcggcatgccggaacagcagaccagccactggcgtcggcaaattgtccgcatcagtctcgcattgctgcctatccatttctggtctgtggtggcagaactttccccgctgcatctgatggatgatgtgctggggcaagcgatgattttcttcaacctgctgctgattgccttcctggtatggccgatgtgccgcgaaagctggcgtgataaagagtcgcacaccatgcgactggtcaccattaccgtgctgtcgataatcccgattgcgctgatggtgctgactgctacaggctacttctacactacgctgcgtctggcaggacgctggattgaaaccgtttatctggtgatcatctggaacctgctgtaccagacggtactgcgtggcttaagcgtagcggcgcggcgtatcgcctggcgtcgtgcgctggcgcgtcggcagaatctggtgaaagagggcgcagaaggtgctgaaccgccggaagaacccaccattgcactggagcaagttaaccagcagacgctgcgtattaccatgttgctgatgtttgcgctgttcggtgtcatgttctgggcaatttggtccgatttgatcaccgtgttcagctatctcgacagcatcacgctctggcattacaacggcactgaagctggcgctgcggtggtgaaaaacgtcaccatgggcagtctgttgtttgcgattatcgcctcaatggtggcctgggcgttgattcgcaacctgcctggtttactggaagtgctggtgctctcgcgactgaatatgcgccagggcgcgtcgtatgccattactaccatccttaactacatcattattgctgttggtgcgatgacggtgttcggatcgctgggcgtctcttgggataaactccagtggctggccgcagcattatccgtaggtcttggttttggtttacaagaaattttcggtaacttcgtctccggtttgatcattctattcgaacgtccggtgcgtattggcgatacggtaaccattggtagcttctcggggacggtaagtaagatccgtattcgtgcgacaacgattaccgatttcgatcgcaaagaagtgatcatcccgaacaaagcgtttgttaccgagcgtctgatcaactggtcgttgactgacactactacgcgtctggtgatccgtctcggcgtggcctatggctccgatctggaaaaagtgcgtaaagtgttactgaaggcggcgactgagcacccaagggtgatgcacgaaccaatgccggaagtcttctttacggcatttggtgccagcacgttggatcatgagctgcgtctgtatgtgcgtgaactgcgtgaccgtagtcgtactgtcgatgagctgaaccgtactatcgatcagctgtgccgtgaaaacgacatcaacattgcctttaaccagcttgaagtgcatctgcacaacgagaagggcgatgaggtgacggaagtaaaacgcgactacaaaggcgatgacccgacgccagcggtagggtaaaaacgaaagggggcaacatttagttgccccgagattgctaacaaagtgcgcgttgttcatgccggatgcggcgtgaccgccttatccggcctacgaaaccgcaagaattcaatatattgcaggagcggtgtaggcctgataagcgtagcgcatcaggcagttttgcgtttgcccgcaaccttaggggacatttagcgaccccatttatttctcacttttccgcctcatcatcgcgcgttaatttcttttcataatcacgctttacaatatccagcgcgcgcagcacggtactggcagggatctgattttcctccagcagcacaatcaaatcgacagccagtttgacatcgtcaggggcattttccagtgacatattctctccattgctagcgggttaaacgcgctaacctgttttcgattttttccagcgcatggcggcagcgtgccaggcgcgcttcataggcttccacttcacgatgcagcgtttgctgttccacgagatcggtcacccgcgccagacgggctctgcgttcggcaaccatctcacgtagccgccgctcaaaatcctgatgctgaatacgtttacgctgccagcgggcaattttcggtggtgcactgtcccactcgcgcaatgaccaggcggaggcttcacgcgcgatggcttccagttgtgccgccagatgttccgccagccaggccacttgcggcagctgttgctgctcaactgcatgacgaagcgcagccagattatcgcccgcctcgtcgagacaagcctgtagtgttgtcgcacgagtctgaaaaagatgcctgtcgaaacgagcacttagcgtggcgaactgtgacaccggggcacaacgctgacgcagcgtagcgagctgtccttccagtttttccagcagcagggcggttttcacgataagacctcaatgaaaatgataattgttatgctaaagtagccactctgtaagctgacaacactcaatatgcaacgaatcattttaatcatcattggctggctggcggtagtgctgggtacgctgggcgtggtattaccggtattaccgacgacgccgtttatcctgctggcggcctggtgctttgcccgttcttccccgcgctttcacgcctggttgctgtaccgctcatggtttggcagctatctacgtttctggcagaaacatcatgcgatgccgcgcggcgtcaaaccgcgggcgattttgcttattttgctcacgtttgccatttctctgtggttcgtccagatgccatgggtgcgcatcatgttgctggtaattctcgcctgtttgcttttctatatgtggcgaattccggtgattgatgaaaagcaagaaaagcactgaagcacaacaatcgcagttgcaattattgcgtacagccagtacattctggcgttttcgagcacaggcgcaggcggtcaaaggttaaacaactgttacttttgatacgtttaaaacgcgccgtgagtaccaccgtaacaagcaggcatacacttatgaccgcgactgcacagcagcttgagtatctcaaaaatagcatcaaaagcattcaggactacccaaaacccggcattcttttccgcgatgtcaccagcttactggaagacccgaaagcttacgctctcagcatcgacttgctggttgagcgttacaaaaatgcgggcattaccaaagttgtcggcaccgaagcgcgtggcttcttgtttggcgctccggtagctctgggtctgggcgttggctttgtaccggtccgtaaaccgggcaaactgccgcgtgaaaccatcagtgaaacttacgacctggaatacggcaccgatcagctggagatccacgttgatgccatcaaaccgggcgacaaagttctggtggtggacgacctgctggcaaccggcggcactatcgaagcgaccgttaaactgatccgtcgtctgggtggtgaagtggctgacgctgcgttcattatcaacctgttcgatctcggcggcgaacagcgtctcgaaaaacagggcattaccagctacagccttgtcccgttcccgggccattaattatcgccagtcttgtgctgcccacgctacggacagcacaagatgtgcattcagcctcgccgttctgacggggctgtgttagcattaccccttcgtgaatccaccttccagcgtttcagagcctgccaatgagttatcaggtcttagcccgaaaatggcgcccacaaacctttgctgacgtcgtcggccaggaacatgtgctgaccgcactggcgaacggcttgtcgttagggcgtattcatcatgcttatcttttttccggcacccgtggcgtcggaaaaacctctatcgcccgactgctggcgaaggggctaaactgcgaaaccggcattaccgcgacgccgtgcggcgtgtgcgataactgtcgtgaaatcgagcaggggcgctttgtcgatctgattgaaatcgacgccgcctcgcgcaccaaagttgaagatacccgcgacctgctggataacgtccagtacgctccggcgcgtggtcgtttcaaagtttatctgatcgacgaagtgcatatgctgtcgcgccacagctttaacgcactgttaaaaacccttgaagagccgccggagcacgttaagtttctgctggcgacgaccgatccacagaaattgccggtgacgattttgtcacgctgtctgcaatttcatctcaaggcgctggatgtcgagcaaattcgccatcagcttgagcacatcctcaacgaagaacatatcgctcacgagccgcgggcgctgcaattgctggcacgcgccgctgaaggcagcctgcgagatgccttaagtctgaccgaccaggcgattgccagcggtgacggccaggtttcaacccaggcggtcagtgcgatgctgggtacgcttgacgacgatcaggcgctgtcgctggttgaagcgatggtcgaggccaacggcgagcgcgtaatggcgctgattaatgaagccgctgcccgtggtatcgagtgggaagcgttgctggtggaaatgctcggcctgttgcatcgtattgcgatggtacaactttcgcctgctgcacttggcaacgacatggccgccatcgagctgcggatgcgtgaactggcgcgcaccataccgccgacggatattcagctttactatcagacgctgttgattggtcgcaaagaattaccgtatgcgccggaccgtcgcatgggcgttgagatgacgctgctgcgcgcgctggcattccatccgcgtatgccgctgcctgagccagaagtgccacgacagtcctttgcacccgtcgcgccaacggcagtaatgacgccaacccaggtgccgccgcaaccgcaatcagcgccgcagcaggcaccgactgtaccgctcccggaaaccaccagccaggtgctggcggcgcgccagcagttgcagcgcgtgcagggagcaaccaaagcaaaaaagagtgaaccggcagccgctacccgcgcgcggccggtgaataacgctgcgctggaaagactggcttcggtcaccgatcgcgttcaggcgcgtccggtgccatcggcgctggaaaaagcgccagccaaaaaagaagcgtatcgctggaaggcgaccactccggtgatgcagcaaaaagaagtggtcgccacgccgaaggcgctgaaaaaagcgctggaacatgaaaaaacgccggaactggcggcgaagctagcggcagaagccattgagcgcgacccgtgggcggcacaggtgagccaactttcgctaccaaaactggtcgaacaggtggcgttaaatgcctggaaagaggagagcgacaacgcagtatgtctgcatttgcgctcctctcagcggcatttgaacaaccgcggtgcacagcaaaaactggctgaagcgttgagcatgttaaaaggttcaacggttgaactgactatcgttgaagatgataatcccgcggtgcgtacgccgctggagtggcgtcaggcgatatacgaagaaaaacttgcgcaggcgcgcgagtccattattgcggataataatattcagaccctgcgtcggttcttcgatgcggagctggatgaagaaagtatccgccccatttgatcgtaagcacagcttacgttcgtcatccttaacgtgattgagagagaaacctatgtttggtaaaggcggtctgggtaacctgatgaagcaagcccagcagatgcaagaaaaaatgcagaaaatgcaggaagagatcgcgcagctggaagtcaccggcgaatctggcgcaggtctggtaaaagtgaccatcaacggtgcacacaactgccgtcgcgtagagatcgacccgagcctgctggaagacgacaaagagatgctggaagacctggtggctgcagcattcaacgacgcagcacgtcgtattgaagaaacgcagaaagaaaaaatggcctctgtatcctccggaatgcagctgccgcctggctttaagatgccgttctgatgcaaaccagcccgctgttaacacagcttatggaagcactgcgctgtctgccgggcgttggcccgaagtcggcgcagcgtatggcgttcacgctgcttcagcgcgatcgtagcggcgggatgcgtctggcgcaggcgctcacccgggcgatgtcggaaatcggccactgcgccgattgccgcactttcaccgaacaggaagtctgtaacatctgttcgaatccgcgtcgtcaggaaaacggtcaaatctgcgtggtggagagtccggcggacatctacgccattgagcagacggggcagttttcaggtcgttattttgtgttgatggggcatctgtcaccgctggacggcatcggtccggatgatatcgggcttgatcgtctggaacagcgtctggcagaggaaaaaatcactgaagtgatcctcgccaccaaccccacggttgaaggtgaagctaccgctaactacattgccgagctttgcgcgcaatatgacgtggaagccagccgaatcgctcatggcgttccggttggcggcgagctggaaatggtcgacggcaccacgttgtcacactcccttgccgggcgtcataagattcgtttttaagcaaacgagagcaggatcacctgctctcgcttgaaattattctcccttgtccccatctctcccacatcctgtttttaaccttaaaatggcattattgaggtagacctacatgaaaggacaagaaactcgtggttttcagtcagaagtgaaacagcttctgcacctgatgatccattctctctattccaataaagaaatcttcctgcgtgagcttatctctaacgcctccgatgcggcggacaagctgcgtttccgtgcgctctctaacccggacctgtacgaaggtgatggcgaactacgcgttcgtgtctctttcgataaagacaagcgtacgctgaccatctccgataacggcgtggggatgacccgcgacgaagtgattgaccatctggggactatcgctaaatccggtaccaaatcattcctcgaatccctgggttctgaccaggcgaaagacagccagctgatcggtcagtttggtgttggtttctactctgcgtttatcgtggccgacaaagtgaccgtgcgtactcgcgcggcaggcgaaaaaccagaaaatggcgtcttctgggaatcggctggcgaaggtgaatacaccgttgccgacatcaccaaagaagatcgtggtactgaaatcaccctgcatctgcgtgaaggcgaagacgagttcctcgatgactggcgcgtgcgttccatcatcagcaaatactccgaccatatcgcgctgccggtagagatcgaaaaacgcgaagagaaagacggcgaaaccgttatctcctgggagaaaatcaacaaagcgcaggcgctgtggactcgtaacaagtcggaaatcaccgatgaagagtacaaagagttctacaaacacatcgcccacgactttaatgatccgctgacctggagccacaaccgtgttgaaggtaagcaggagtacaccagcctgctgtacatcccgtcccaggctccgtgggatatgtggaaccgcgatcataaacacggcctgaaactgtatgttcagcgtgtgttcatcatggacgacgcagaacagttcatgccgaactatctgcgcttcgtgcgtggtctgattgactccagcgatctgccgctgaacgtttcccgtgaaatcctccaggacagcacggtaacgcgtaacctgcgcaatgcgctgaccaagcgtgtgctgcaaatgctggaaaaactggcgaaagacgacgcggaaaaataccagaccttctggcaacagtttggcctggtactgaaagaaggtccggcggaagatttcgctaaccaggaagcgatcgccaaactgctgcgttttgcttctacccataccgattcttctgcgcagaccgtatctctggaagactacgtttcccgcatgaaagaagggcaggagaaaatctactacatcaccgcagacagctatgcggcagcgaagagcagcccgcacctggaactgctgcgtaagaaaggcatcgaagttctgctgctttccgaccgcatcgatgagtggatgatgaactatctgactgagttcgacggtaaaccgttccagtcggtgtctaaagttgacgagtcgcttgaaaaactggctgacgaagttgatgagagcgcgaaagaagcggagaaagcactgactccgttcatcgaccgtgtgaaagccctgctcggcgagcgcgtgaaagatgtccgtctgactcaccgtctgaccgatacgccagcgatcgtttcgaccgacgcggacgaaatgagcactcagatggcgaaactgttcgctgcggcgggccagaaagtgccagaagtgaaatacatcttcgaactgaacccggatcacgtactggtgaaacgtgcggcagatactgaagatgaagcgaagttcagcgagtgggtagaactgctgctggatcaggcgctgctggcagaacgcggcacgctggaagatccgaacctgtttattcgtcgtatgaaccagctgctggtttcctgatgtaatgccggatgaccttcgtgtcatccggcatttttcttttcatcatctgcactttccgcaaattatctcgccattaaccgtttcagccccaggtgcctttcttgaggcaatcgcctgttggtggtatcgtttatcgctttttcaaaaaattcgacacattttaaggggattttcgcaatgcgtatcattctgcttggcgctccgggcgcggggaaagggactcaggctcagttcatcatggagaaatatggtattccgcaaatctccactggcgatatgctgcgtgctgcggtcaaatctggctccgagctgggtaaacaagcaaaagacattatggatgctggcaaactggtcaccgacgaactggtgatcgcgctggttaaagagcgcattgctcaggaagactgccgtaatggtttcctgttggacggcttcccgcgtaccattccgcaggcagacgcgatgaaagaagcgggcatcaatgttgattacgttctggaattcgacgtaccggacgaactgatcgttgaccgtatcgtcggtcgccgcgttcatgcgccgtctggtcgtgtttatcacgttaaattcaatccgccgaaagtagaaggcaaagacgacgttaccggtgaagaactgactacccgtaaagatgatcaggaagagaccgtacgtaaacgtctggttgaataccatcagatgacagcaccgctgatcggctactactccaaagaagcagaagcgggtaataccaaatacgcgaaagttgacggcaccaagccggttgctgaagttcgcgctgatctggaaaaaatcctcggctaattcgaaagcgcgcacggacagtcccctcgccccctcggggagagggttagggtgaggggaacaggcccgcacaagcaaacttatcagcaatctcaggccggatattcattcggccttttacaaaaacctcaatctgcgctattcctttttctgatttgacctctcacagcaattagttcttcttcctcacttttccgctacaattatcaacaagttgaatcgataagaggcggtaatgcgtcagactaaaaccggtatcctgctggcaaacctgggtacgcccgatgcccccacacctgaagcggtaaaacgctatctgaaacaatttttaagcgacagacgcgtggttgatacctcacggttgttatggtggccattgctgcgcggcgtgattttgccgctgcgctcgccgcgtgtggcgaagctgtatgcctctgtctggatggaaggtggctcgccgctgatggtttacagccgccagcaacagcaggcgctggcacaacgtttaccggagatgcccgtagcgctgggaatgagctacggctcgccatcactggaaagcgccgtagatgaactcctggcagagcatgtagatcatattgtggtgctgccgctttatccgcaattctcctgttctacggtcggtgcggtatgggatgaactggcacgcattctggcgcgcaaacgtagcattccggggatatcgtttatacgtgattacgccgataaccacgattacattaatgcactggcgaacagcgtacgcgcttcttttgccaaacatggcgaaccggatctgctactgctctcttatcatggcattccccagcgttatgcagatgaaggcgatgattacccgcaacgttgccgcacaacgactcgtgaactggcttccgcattggggatggcaccggaaaaagtgatgatgacctttcagtcgcgctttggtcgggaaccctggctgatgccttataccgacgaaacgctgaaaatgctcggagaaaaaggcgtaggtcatattcaggtgatgtgcccgggctttgctgcggattgtctggagacgctggaagagattgccgagcaaaaccgtgaggtcttcctcggtgccggcgggaaaaaatatgaatatattccggcgcttaatgccacgccggaacatatcgaaatgatggctaatcttgttgccgcgtatcgctaaagctgagcggtaaagaactgagcgccgtcgcgaagagcctcgtcggcggttttcatcatccgtgaataatgcaaaaaggcgtgcagcgtgcctgggtagagtttgaactcacagggctgctgatgcgccgctaacgtctggtaaagcagacggctgtcatccagcagcggatcgaactccgccccggcaataaaacagggcggaacttcgcgagtgagatcattattaaacagacagtaatacggcgactcgcggtccgcgtcgttgcttaaatatgcctcttcgtacatctgcaaatcctgttgcgttaagccatcccagacaccgcccaacagacgacgagtcacggaatcccgtaatccgtaaagcccataccacagcaaaacgcccgcaactttaccgcaatcgatctgtttatcacgcaaccacaacgcactggcgagcgccagcatggcacctgcggaatcaccggcaaagccaatgcgggacatattgatttgataatcctccgcctgctggtggaaataacaacaagcagccacaatttcctctatcgcttgcggaaaacgcgcttcaggtgaaagggtgtaatcaataccaatcaccgtacattggctgtagcttgccagcaggcgcatgatgcgatcgtgggtatcgagattgccgagaataaaaccgcctccatgcaaataaaatagcgtcgctgggctatctggctgcggacaaaagagacgtgtttccacctgcccatattttgttggaaccatgtaagctctggttgccatttctggagcgcccgcattccagaatcggcgctcaagcgtgtaatactgtcgttgctcagcaatcgttcccgttgcgggccagggcggtaaatccggctgaagagtattcacaacggtcttcatttcagcagaaataaggtccagaacaggtagtttgttttccggcttcatacaaaaactcctttcaaattacgtcattgtaaggaaccactgccatgaaaatgcgatcccgcctgctgatattgaaactggctgcgtctcgcgcgctcccgtcagattgtgttaacattcgccgctcagttaaccacccgtaaaaacaaccatgaaatttcccggtaaacgtaaatccaaacattacttccccgtaaacgcacgcgatccgctgcttcagcaattccagccagaaaacgaaaccagcgctgcctgggtagtgggtatcgatcaaacgctggtcgatattgaagcgaaagtggatgatgaatttattgagcgttatggattaagcgccgggcattcactggtgattgaggatgatgtagccgaagcgctttatcaggaactaaaacagaaaaacctgattacccatcagtttgcgggtggcaccattggtaacaccatgcacaactactcggtgctcgcggacgaccgttcggtgctgctgggcgtcatgtgcagcaatattgaaattggcagttatgcctatcgttacctgtgtaacacttccagccgtaccgatcttaactatctacaaggcgtggatggcccgattggtcgttgctttacgctgattggcgagtccggggaacgtacctttgctatcagtccaggccacatgaaccagctgcgggctgaaagcattccggaagatgtgattgccggagcctcggcactggttctcacctcatatctggtgcgttgcaagccgggtgaacccatgccggaagcaaccatgaaagccattgagtacgcgaagaaatataacgtaccggtggtgctgacgctgggcaccaagtttgtcattgccgagaatccgcagtggtggcagcaattcctcaaagatcacgtctctatccttgcgatgaacgaagatgaagccgaagcgttgaccggagaaagcgatccgttgttggcatctgacaaggcgctggactgggtagatctggtgctgtgcaccgccgggccaatcggcttgtatatggcgggctttaccgaagacgaagcgaaacgtaaaacccagcatccgctgctgccgggcgctatagcggaattcaaccagtatgagtttagccgcgccatgcgccacaaggattgccagaatccgctgcgtgtatattcgcacattgcgccgtacatgggcgggccggaaaaaatcatgaacactaatggagcgggggatggcgcattggcagcgttgctgcatgacattaccgccaacagctaccatcgtagcaacgtaccaaactccagcaaacataaattcacctggttaacttattcatcgttagcgcaggtgtgtaaatatgctaaccgtgtgagctatcaggtactgaaccagcattcacctcgtttaacgcgcggcttgccggagcgtgaagacagcctggaagagtcttactgggatcgttaagttatcgtcggttcgtaggccagataaggcgttcacgccgcatctggcatttggctctcgatgcctgatgcgacgctggcgcgtcttatcatgcctacatatttttcatattttacatccggcaaccaccgtttaccccgtcaccacctcacccgccggtggcgtttccagcagttccagcatggtacgggcgatttcacgctcgcccatcactacctgattcgcaccacgttcggtgatatacgccacttcatcgtcataatgggcgcgggcaataatctcaatatccggatttttcgcgcgggcagatgccacaatctcacccgcttcataaccgttgggaatcgtcaggatcagccattttgcacattccagatgcgccagttgcataatttcttcgttcgccgcattgcccaatactgcgcggaccccgcgctctcgcagctcatcaacacgggttcgtgacgtctcaatcaccaccagcggaatatcagaggcgagcaatttctcccccagcaggctgcctacacgaccgtaacccaccagtagcgcatggttgcaaatatccactgggatctgcttctcttcttcgattgcctcttccagcgtctgctcttccagcgtttcggtcttcgccagatatttctccagtagtgcgaacagtaccgggttgagcataatcgacaggatcgcccctgccagtaccaggttttgtccggcctgcggcagtaaattcaatgccattcccagtcccgccaggataaacgcgaactcaccaatctgcgccaggctggcggcgatggttaatgccgtacgttgggagtgaccaaacagtcgcaccaggaaaaatgcggctaacgacttaccaaacagaataatcgccagcgtcgccagcactgccagcggttgctgaatcagaattaacggatcaaacaacatcccgacggagacaaaaaacagcaccgcaaacgcgtcgcgcaatggcagcgtatcgtgggcggcacggtgactcagttcagactcgttcagtaccatcccggcaaagaacgcaccgagtgcaaaggagacatcaaacagctctaccgcaccaaaggcaacccctaacgccagcgccagcaccgacagggtaaacagctcgcgagaaccggttgccgcgctgcgtgccataatccacggcaccagacggcgacctaccagcatcataatggcgataaatgcgatcactttgccgatggtgatccccatatcgactgcaagagtggcaaagcccacatcgccctgttccatcattcctgccactgcgggcagcaacaccagcgtcagaaccattaccaggtcttccacaatcaaccaaccgatggcgatttgcccacgctgactgtcaattaattgccgttcttcaagtgcgcgcagtaacaccacggtactggcggtggaaagacataaaccgaacacgataccggtcattaacgaccagcccagcacggcagagagcgccatacccagcagcgtcgccacggctatctgggcgatcgcaccgggaatggcgatggcctttaccgccatcaaatccttcagcgaaaagtgcaaaccgacgccaaacatcaacagaatgacgcccagttcagccagttccggggcaagcttggtatcggcaacaaagcccggagtgaatggtcctgccagcacacccgctaacagatatcccaccagaggagaaatacgtagtttattggccagcatgccgaggataaaggcgagcacaaggccgccaacaatggtggtgataagcggggtggcgtgatgcattccgtctccttttcctggtggttattgtccatttttggccgggaaaaccaaaattacaggtaatagtttatgacaatttcattgatgatgttcatgaataattattgaattttgcagaaaaatggaattagctgcaaaaaaagcacggatcggaaaacagaaggcggtttaacagaggaaaggcttatggcgactgtaaaacgatgcagccaaagtttgcctttggctgcaatgaaatcagtctttatgccggttatcaggcaggaatatggtcaacatccccaatagtggcaggaaagcacagattttatagactaactcgatgctggtgtgatcggcgataagccccagaactgccgctcccagacctcccatgccaaaagcaaaaccgaaaaagagtccagaaaccataccgatacgtcctggaagcagctcctgagcgtagaccagaatggcagagaatgccgaagcgaggataaatccaataatcaccgttaaaacccccgtccagtgcaggctggcgtagggtaaaatcagcgtaaacggcgcaacgccgaggatagagccccaaatcacatatttccgcccaattttatcccctacaggcccgccgatcaccgtacctgccgcaacggcaaacaggaaggcaaacagatgaagctgagcattctggatagataatccgaatttttgcatcagataaaaggtgtaatagctgctgatgctcgccatatagaaatatttcgagaaaatgaggattaacagaatgctgaccgccagtacaactttattgcgcggcagtggattgataatcgtcgctttgggttttcctttattcattcggtgctgtgccgagtaccaacggctgatttgcgccaacaccacgatcgccagcagtgccgcaagcacaaaccaggcaacgttgcctttgccataaggcgcgataatcaccgccgccagcaagggtcccagggaactgccaaagttgccgccgacctgaaagatagattgcgccaggccatgccgcccgccggaagccatacgggccacgcgagaagattccggatgaaagaccgatgaaccggtaccgaccagcgccgccgccagcagaactgcgccaaaactgcccgccagcgcaagcagcaccagaccgcttaaggtaaagcacatgccaattggcaacgaccatggcatcggatatttatcggtccagtagccgaccactggttgcagtagcgaagaggcgagctggaaggtgagggttatcatgccaatctgcataaatgtcagagaaaattctgactgaagcagcggataaatcgccagaatcagcgattggatcatgtcgttcagcagatgtgagaggctgatagcacctaaaataccaaacgatgttcgggccttggtcgttgacgcagccgcgcccgccacaggctggggttgttcactcattgccataggaaagtcactttttcagggttgcgatgtaaagaatgatcttatttgtgattattaccagactaacatacctgtatgcgtcgtctgaaggaagtctcaacgccgaatacagaatttctaatctggatgcagatttatcttcaccggacgcagacttgtctatgatgtcgcgtcatactatttttcaacacgttgaaatcaggtcagggagagaagtatgaaattattgcagcggggcgtggcgttagcgctgttaaccacatttacactggcgagtgaaactgctctggcgtatgagcaggataaaacctacaaaattacagttctgcataccaatgatcatcatgggcatttttggcgcaatgaatatggcgaatatggtctggcggcgcaaaaaacgctggtggatggtatccgcaaagaggttgcggctgaaggcggtagcgtgctgctactttccggtggcgacattaacactggcgtgcccgagtctgacttacaggatgccgaacctgattttcgcggtatgaatctggtgggctatgacgcgatggcgatcggtaatcatgaatttgataatccgctcaccgtattacgccagcaggaaaagtgggccaagttcccgttgctttccgcgaatatctaccagaaaagtactggcgagcgcctgtttaaaccgtgggcgctgtttaagcgtcaggatctgaaaattgccgttattgggctgacaaccgatgacacagcaaaaattggtaacccggaatacttcactgatatcgaatttcgtaagcccgccgatgaagcgaagctggtgattcaggagctgcaacagacagaaaagccagacattattatcgcggcgacccatatggggcattacgataatggtgagcacggctctaacgcaccgggcgatgtggagatggcacgcgcgctgcctgccggatcgctggcgatgatcgtcggtggtcactcgcaagatccggtctgcatggcggcagaaaacaaaaaacaggtcgattacgtgccgggtacgccatgcaaaccagatcaacaaaacggcatctggattgtgcaggcgcatgagtggggcaaatacgtgggacgggctgattttgagtttcgtaatggcgaaatgaaaatggttaactaccagctgattccggtgaacctgaagaagaaagtgacctgggaagacgggaaaagcgagcgcgtgctttacactcctgaaatcgctgaaaaccagcaaatgatctcgctgttatcaccgttccagaacaaaggcaaagcgcagctggaagtgaaaataggcgaaaccaatggtcgtctggaaggcgatcgtgacaaagtgcgttttgtacagaccaatatggggcggttgattctggcagcccaaatggatcgcactggtgccgactttgcggtgatgagcggaggcggaattcgtgattctatcgaagcaggcgatatcagctataaaaacgtgctgaaagtgcagccattcggcaatgtggtggtgtatgccgacatgaccggtaaagaggtgattgattacctgaccgccgtcgcgcagatgaagccagattcaggtgcctacccgcaatttgccaacgttagctttgtggcgaaagacggcaaactgaacgaccttaaaatcaaaggcgaaccggtcgatccggcgaaaacttaccgtatggcgacattaaacttcaatgccaccggcggtgatggatatccgcgccttgataacaaaccgggctatgtgaataccggctttattgatgccgaagtgctgaaagcgtatatccagaaaagctcgccgctggatgtgagtgtttatgaaccgaaaggtgaggtgagctggcagtaatccgaaagtgccggatgtttgcatccggcacaatgcttaatcgcggcgggcgatatcagcaaatttggcatcgaggatctttgccagatcgcctgccgccagttcgatatccagtccgcgcttgccgccggaaacataaatagtggcaaattcttgtgcgggggcgtcgataatcgttggcagacgttttttctgccccagtgggctaatccccccaaccaggtatcccgtcgaacgctgcgcgaccatcggatcggccatctcaactttcttggcacccagcgcttttgctacttttttaagatccagttgacctgcgaccggcgtaacggccacggcaaggtgtttcatatcaccgttcactgccaccagcagcgttttgtagacctgatccggattcaaacctaattttttgacgacttcatcgccaaaattggtttcagccggatcgtgctcgtaggtatggatttgaaacgaaatcttgtttttttcgagtaatttaactgcgggtgtcatggtaattttcctgccttaaacaaaaaaacgaagcaagcatacgcctgatggcggtccaaaaaaaagagtcatcttgcctaagagtattggcaggatggtgagattgagcgacaatcgagttacaccgtcgcttaaagtgacggcataataataaaaaaatgaaattcctctttgacgggccaatagcgatattggccatttttttagcgcaacatttgcggcaaattcccttctccatacaggtgtagtgcaccgaccgcgaccacatatcgccccggcggcatggcgcgtaatttatcccgccaggcgagatttcgctgatgcatcagcacatcgtacagcgactgactgaacgtattgggcagcgttatatcattattttgcggcggtgcattcagccaccagctcatcatttgttgcagcaaccgtgcgttggtatgccagtgggtcagcgtatcgtccagcagcgccagtcctttgtcagggagctggagcaacatggcaatctggttttcagccccttccagttcaatcacgggtttatgttgttgcttcgccgcctgcaatagctggtaatcgataccgtattctgcccgcagccccagtttttgtgcctgcgtcgcctgaagaaccatcgcgatttgccacagcggttgggtagaaaagagtgagggagaaatgcccatctcctggctaatgtgctgcaggttttggagttgctcctcgctaatgcgctcttccagcgcctcgcaggcaggcaaattagcaaaaggcgtatcgctggtggaaacatccgcctcgacgatcagcgcatcggcgtttttgagctttttgagcaaacgggtgggcaggggagccatatcgtggctacccatatgaatactgccaatcagatgaaaatggcgattgccggggagggtgatatcgatggcaggccaggtgtaatgattaccgcgcagcgcggcccaaagcgtttttacccggtacaacagatccatacgacctccctttgtgaaatatcatgctagcgcgcggtgagggatggcgcaaatggagttggagacttgtttaatgtgtttgtatgattcagtatgttcttgcatcgctattcacaaggaagcaacagttaaaaaccatgaaacaggcaacaagaaaaccgacgacacccggagatattcttctctatgaatatctggaaccgctcgatttgaaaatcaatgagttagcagagttgctgcatgttcatcgtaatagcgtcagtgcactgatcaataacaatcgtaaactcactactgagatggcatttcgtctggcgaaagtttttgataccacagtcgatttttggctaaacctccaggcggcggttgatctttgggaagttgaaaacaacatgcgcacccaggaagaattgggacggattgaaacagtggctgaatatttggcacgccgtgaagagcgtgcaaaaaaggtcgcgtaaggccaaaacatcgcttcatctcgtaggccggataaggcgttcacgccgcatccggcatccgagcaccattgcctgatgcgacgcttacccgtcttatcaggcctacaaacttgtgcctgaaccgtaggccggataaggcgtttacgccgcatccggcatccgagcaccattgcctgatgcgacgcttacgcgtcttatcaggcctacaaacctgtgcctgaaccgtaggccggataaggcgtttacgccgcatccggcagtcatgcgtcgatgccaaatgcgccaccctaaagcagcgcatccgcaatgatgtacttattccttcggtttaaaccgcagcaaccggttggcgttactcactacggtaatcgacgagagcgccattgccgctccggcaactaccgggttaagcagtgttccagtgaacggccacaaaataccggcggcgaccggaataccgatactgttgtagataaacgcaccgagcaggttctgcttcatgttgtgcagcgttgcgcgggaaatagcgagcgcatccgcaacgcccatcaggctatggcgcatcagggtaatcgccgcggtttcaatggcaacatcactgccgccacccatcgcaatgccgacatccgcctgagccagcgctggcgcgtcgttaatgccgtcgcccaccattgccacctgacgtccttcactttgcagatgtttgatcgcttcggctttaccgtccggcagcaccccggcgatcacctcatcaatccctgcttctttggcgatcgcattggcggtggttgggttatccccggtcaacatcaccagacgatatcccgctttatgcaggcgttgcagcgccgccacgctatcactacgcaacggatcgcgtactgccagcagggctaccgctttcccgtcaaccgccagcagcacaggcgttgccccttgcgatgcctgagcagtaatctccgcttcgatagctttggtaccaacctgttgctcatttaacagcgcctgattgcccagcaataacgcatgaccttcagcttcaccgctcacgcccagcccgcgcaatgtgcggaaaccgttgacctgcggtagctgcatatcacctgctttatcgaggatcgctcgtgccagcggatggctggaaccttgctccagtgccgccgccagacgcaatgcctgcgcttcatcaacatcagcaaatgttttcactgcgacaacctgcggcttcccttcagtcagcgtcccggttttatcgaacactacagtgtcgagtgtactggcgcgttgcagcgcgtcagcgtcccgcaccagcacgccaaactcagccgcccgcccgacgccggaaataatcgacatcggcgtcgccagccccagcgcacacggacaggcaataatcagtaccgtggtggcaatcaccagggtatagacaatctgcggtgccggaccaaagaaataccagattgccgcactgacaagcgcaataaccaccactaccggcacaaatacggctgagattttatccgccagctgaccgatttctggcttgctgctctgggcctggcgcaccatgcgaatgattcgtgacagcgtagtatggctgccaaccgcactggcacgaaacagcacactgccgtcctgtaccactgtcccggcatggacgctatcgccttcgcctttttgctgcgggattggttcgcccgtcagcatcgcttcatccagccatgcttcgccctgggtaatctcgccatctaccggcacgcgatcgccggtcgtcaggcgcagcaacatacctggctgcacttctgccagaggcacgcttttttcaccttcgtcagtaaccaggcgtgccgtcggcggggttaaatcgagtaacttttccagcgccttagaagaacgctggcgtgcgcgcgcttccagcatatggccgagattgatcagaccgataatcatcgcgctggcttcgtaataaagatgtcgcgcttccatcgggaaccactgcggccacaggttgacgctcatcgaatagagccacgccacgccagtacccagcgccaccagcgtatccatcgtcgccgcaccgttcagcaggcttttccatgcactgcggtaaaaatggccgccggcgaaaaccatcactgccagggttatcaggccgataaccaaccacaggctgcggttgtcagcggtgaccatcatgttatcgccgatcatcccccagaccatcaccgggatacccaccgccagtgcgacaattgcctgccagcggaagcgcttcatcgtagcgacggcggtttcttgctggcgctcgcggcgtttagcgtcatcttcaatcgcttccgcgccgtagcccgctttttccaccgcctgcactaaatcttgtggggaggcactgcccatcaccagcgcagtacgctccgccaggtttacccgtgcctgagtgacgcccggtacgctttgcagcgcattttgtacgcgggtgacacagctggcgcagctcatgccgctcagcagcaactgctggctgtcatcgtcatcggcggtcgctgccggaagcgcctcagaaaccgctgtcagtgcttccgacgggattgatgactccgccagcggtttagcctttgggtggcttacagatgcgtcataacccgcttgtttgatggtttcgatcagctgttctgcactggcagtcccggtaacgtgcgcttcagtgatagacacatccgcctgctcaacatccggacgctgttcaagactttctttcacgcgtttaacgcagtgaccgcaggacaggccgtccagggtcaggtcgatagtttgtgacataaaacactcctttaagacagttttgactggctgtgataaaggttaaaccttccagcaaggggaaggtcaagaaattaataaaccaggcgggtaaaagtccgtaaagattaaaaaatcggctcgatttgcatcaggattagacatttatctctttgttttcctgtagttaagttgcgggtgctaagttaaatcaggatgcctgaaaatcggcaccggggtgaggaattacctcccgcatctataaaaaggagttaacaaaagatgttagatgcaaacaaattacagcaggcagtggatcaggcttacacccaatttcactcacttaacggcggacaaaatgccgattacattccctttctggcgaatgtaccaggtcaactggcggcagtggctatcgtgacctgcgatggcaacgtctatagtgcgggtgacagtgattaccgctttgcactggaatccatctcgaaagtctgtacgttagcccttgcgttagaagatgtcggcccgcaggcggtacaggacaaaattggcgctgacccgaccggattgccctttaactcagttatcgccttagagttgcatggcggcaaaccgctttcgccactggtaaatgctggcgctattgccaccaccagcctgattaacgctgaaaatgttgaacaacgctggcagcgaattttacatatccaacagcaactggctggcgagcaggtagcgctctctgacgaagtcaaccagtcggaacaaacaaccaacttccataaccgggccatagcctggctgctgtactccgccggatatctctattgtgatgcaatggaagcctgtgacgtgtatacccgtcagtgctccacgctcctcaatactattgaactggcaacgcttggcgcgacgctggcggcaggtggtgtgaatccgttgacgcataaacgcgttcttcaggccgacaacgtgccgtacattctggccgaaatgatgatggaagggctgtatggtcgctccggtgactgggcgtatcgtgttggtttaccgggcaaaagcggtgtaggtggcggtattctggcggtcgtccctggagtgatgggaattgccgcgttctcaccaccgctggacgaagatggcaacagtgttcgcggtcaaaaaatggtggcatcggtcgctaagcaactcggctataacgtgtttaagggctgatcatgatgaacacggaaggtaataacggtaacaaacctctcggtctatggaacgtcgtttccatcggcattggggcaatggtgggggcggggatcttcgcgctgctggggcaggctgcattgctaatggaagcctcgacctgggtcgcctttgcttttggcggtattgtggcgatgttttccggttatgcctatgcgcgtctgggggcgagctatcccagcaatggcggcattatcgacttctttcgtcgcggattaggcaacggcgtcttttcgctggcgctctcgttactgtacctgttgacgctggcggtgagcatcgccatggtcgcccgtgcttttggcgcttatgccgtgcagtttttgcatgaaggcagccaggaggagcaccttattttgctctacgcgttggggatcattgcggtgatgacgcttttcaactccttaagcaaccatgcggtagggcggctggaagtgatcctcgtcggcattaaaatgatgatcctgttattgctgattattgccggtgtctggtcgctgcaaccggcgcatatttccgtctctgcgccccccagctccggtgcgttcttctcctgtattgggataactttccttgcctatgcgggctttggcatgatggcgaacgcggcggataaagtgaaagatccgcaggtcattatgccacgggcgtttctggtggcgattggcgttaccacgttgctttatatctcgctggcactggttttgcttagcgatgtatcggcattagagttagaaaaatatgccgataccgccgtagcgcaggctgcttctccgctgctcgggcatgtgggttatgtgatcgtcgtcatcggcgctttactggcgacggcttcagccattaacgcgaacctgttcgccgtgtttaacatcatggacaacatgggcagcgaacgcgaactgccgaagctaatgaataaatccctgtggcggcagagtacctggggcaacattattgtcgtggtgttgattatgctgatgacggcggcactgaatttaggctcactcgccagcgttgccagcgccacctttttgatttgctacctggcggtgtttgtggtggcgatccgcctgcgtcatgatattcacgcctcgttgccgattcttatcgttggtacgttggtgatgttgttggtgatcgttggctttatctacagtctgtggtcccagggtagccgtgcgttgatatggattattggctcactcttactcagccttattgtggcaatggtcatgaagcgcaataaaaccgtataacatctctctgtgcgcagtacttcctgtattattgtggtggcggtcgatattcgcactggcaaaaaaacgtgcttgaatatctgttgaaaccctttaacaaagcacaggaggcgttgcgcgaacgatgaacatcagcgatgtagcaaaaattaccggcctgaccagcaaagccattcgcttctatgaagagaaggggctggtgacgccgccgatgcgcagcgaaaacggttatcgcacctacacgcagcagcatctcaacgaactgaccttactgcgccaggcacggcaggtgggctttaacctggaagagagcggcgagctggtgaatctgtttaacgacccgcagcggcacagcgccgacgtcaaacggcgcacgctggagaaggtggcggagatcgaacgacacattgaggagctgcaatccatgcgcgaccagctgctggcactggcgaatgcctgccctggcgatgacagcgccgactgcccgattatcgaaaatctctccggctgctgtcatcatcgggcagggtgattaagacgagacggctcggatatgtagggttatcccttctatcgcaatgacttcaacatgcgtacctgcaccgagatcctcgctggcgctgacaggccatgaactgtcaccgacgcgcatatgaccgcgcccgttgaccagcggagattccagcacaaaacgtcggccaatcagctgctgcccgcgctggtttaaatgactatcgctgtgcttttgttcgcgcacccgccgcgacaaccatttccaccacagccaggcggcgagcagcgtcaggatggcaaacattaccccttgccactcccaacccagcggcaccagccagaccaccaggccggtaatcaccgctgccacgccgctccacaacaaataaccatttccgcccagcatctcggctgccagcagcaaaccgccgagactgagccagaaaatatgtggatgaacgaccattaactccatcatggctgagtccgtttgttggcgctgtctttcaccagctcggcaatcccggcaatcgaccccatcaggctgctggcctctaatggcatcatcactactttgctgttactggaggaaccgatctgctgtaacgcttcggtgtatttctgcgctacgaagtagttcaccgcctgaatatcaccggaggcgatagcttcagacaccattttggtggcgcgggcttctgcttcggcggaacgttcacgcgcttcagcctgtaaaaacgccgactgacgttcgccttccgctttcaggatttgcgactgtttttcaccttcggctttgaggatttccgcctgacggatcccttccgcttcaagaatgtaagcgcgtttggtacgttccgctttcatctgcgcgttcattgaagagataagctctgccggtgggcgcacgtcgcgaatttcaatacgggtgactttaatcccccacgggttggtggcttcatcgacaatacgcagcaggcgtgagttgatgctgtcgcgctgagagagcatttcgtcaagttccattgaacccagcacggtacggatgttagtcatggtcaggttgatgatcgccagctccagattgctgacttcataagccgcgcgcggcgcgtcaatcacctgaataaagcacacggcgtcgatggtaacgttggcgttatctttcgagataacttcctgggaagggatatcgagcacttgctccatcatattgatcttgcgaccaatgcgatccataaacggcaccaccagactgagccccggctgtaacgttttggtatagcgaccaaagcgttctactgtccactgatagccctgcggtacgattttgacacccgcgccgacaatgaccagcgcgacaaaaatgagaatcgggataaagataagcatcggaaaaacctcctgttgtaccgtccataatcagcaaaattgctgcttgattaaacaaattatacctgattactgaaagagagttcccccttattcctgcgaaggataaactgtttttagtaaaaatcagaaaaagggaacagcgatgcaggaaaatagtcctttgcttcagctacaaaacgtaggatatctggcgggtgatgcgaagattcttaataacatcaatttttcgctgcgtgctggcgaatttaagttaattaccggtccttctggttgtggcaaaagtacgctgctaaaaatagttgcttcattgatcagcccaaccagcggaacgttactgtttgaaggtgaggatgtcagcacactaaagccagaaatctaccgccaacaagtctcttactgcgcccagacaccgacgctgtttggcgatacggtatacgataatctgatctttccctggcagatccgtaaccggcagcctgacccagccatttttctcgattttctcgaacgcttcgccttgccggacagcattttgacgaagaatatcgccgagctatctggtggtgaaaaacaacgcatctcattgattcgtaacctgcaatttatgccgaaggttttattgctggatgaaataaccagtgcgctggatgaaagtaataaacataacgtcaatgagatgatccatcgttatgtgcgcgagcaaaatattgccgtgctgtgggtgacacacgataaagacgaaattaatcatgcggataaagtgattacactgcaaccgcatgccggagaaatgcaggaagcacgctatgaactcgcataatattactaacgaatcattagcactggcattaatgctggtggtggtggcaatcttaattagccataaagaaaaactggcgctggagaaagatattctctggagcgtcgggcgagcgataattcagctgattattgtcggctatgtgctgaagtatattttcagcgtggatgatgccagcctgacattattgatggtgttatttatctgctttaatgcggcgtggaacgcgcaaaaacgcagtaaatatattgctaaagcttttatctcatcgtttattgccattacggtcggggcgggaattaccctggcggtgctgattctctcagggtcgattgaatttatcccgatgcaggtgatccctatcgccgggatgattgccggtaacgccatggtagcggtggggttgtgttacaacaatttagggcaacgggtcattagcgaacagcaacagattcaggagaaactgagtcttggtgcgacgccgaagcaggcttcagcgatattgattcgcgacagtattcgcgcggctttaattccgacggtcgattcagcaaaaacggttggcttagtgagtttaccaggaatgatgtccgggctgatatttgccgggattgatccggtgaaggcgattaaatatcagattatggtgacctttatgctgctctcaaccgccagcttgtcgaccattattgcctgctatttaacctatcgtaagttttataattcgcgccaccagttggtggtgacgcaattgaagaagaaatgatgcgatgccggatgcgcagcatcgcatccggcgttgtggttcatgtgccgatcaacggaatatcaatacaacaatgcatacagctggcggcgatacttcgacgccagtgcatcacccgtacccagcgcagcgaggatctcctggaacgttttacgcgtctgaccgtctgcggcggtgagatctttacgcagatgcccgaacagcaactccagcgcctcttcattgcgcccaacctgatgcagttgcagcgccagttgcgtcgccagtgcggcatcttctggattctccgccacctgctgttgcaactgttgaatttccggcgtatcagccgcctgcttcagcagttcgatttgcgccaccagcccctggtagcgggtgtcctgatcctgcaacggaatggttttcagcaccgcttccgcatcttcagaacggttcagcgcaatcagcgtttctgccagcagcaggccgatctccccgttctgattcgacaactgccaggcgtctttcagcaatggcagggcatcggtgtaattgctttcctgcatcagttgcatcgcctgctgcgctttcagctcttcttcgcgcggcagcactttatccagcagggcgcggatcgcctcttccggttgcggcccctggaagccatctaccggttgcccgttctggaacagatacacggtcggaatcgcacgcagaccaaactgcgcggcaatcatctgctccgcgtcgcagtccagcttcgccagaataaattgcccgttgtactgcgccgcgaggctttccagaattggggttaactgcaaacagtgctggctacgttcagaccaaaaatagaacagcaccggagtggtcatcgactgttcaagaacctgttgcaggttagattcgttaatgttgacaatattttctacggacatggagtcgctctctgttgtcgatattttctttgacatgggggcttaagcgcgcgcttcaactcacccctgcaatattttgtccatcacgcgccccggcagcaggcgcttaagcaccattaccgcccaggtcaccagcgtcaccggatagcgcatcttcggcttctcgctaataaaagcatggcgtactttgtccaccaccgcttccggtcccaacgtaaagcgggcggcgatgccgggattttcgactggtttatcactttgcgtctggttgacgttgtcggtgaagcgagtacgaatgggaccgggttcgatcaggctgactttaattccgctgtggcgcagctccatgcgcagtgcatctgaccacgcctccagcgcatatttactggccgcgtaagcgccacgacccggcgtggagattaatcccatcaccgatgatgtcatcacaatacgcccttcaccgtgcggtaacatcgcgggtaacaggcgcatggtgagctggtgtgcgccgaaaaagttggcggaaaactgctgttccatctgcgcacggctgatggtggaaagggggccatacatgccgaatccggcattgttaaagatcccatacagacaattatcggtcagggcgatcacctcgtcggctgcgcgatcaacactttctggtgaatccagatcgatcaacacgccggtaaatcccatgctgttcatgcgctcaacatcatccggtttccggcaacctgccagcacatgaaaaccctggcgttttaattcgagcgcgctttccaggccaattccactggaacatccggtaattaagaccgatttttgcataactttacctgtcaggatctccgttgctttatgagtcatgatttactaaaggctgcaactgcttcgccatccagtcggcaataaacggctgggcgtcgcggttgggatgaataccgtcatcctgcatccattgtggcttgaggtagacctcttccataaaaaagggcagcagcggaacatcaaactctttggcgagtttggggtaaatggcgctaaaggcttcattataacggcgaccatagtttgcaggcagacgtatttgcattaacaatggttcagcgttggcggctttgacatcctgcaaaatctggcgcagcgtttgctcggtttgctgtggctgaaaaccacgcaaaccgtcattgccgcccagttcaaccagcacccaacgcggctgatgctgtttcagcagagccggaaggcgcgccagtccttgttgcgaggtgtcgccgctgatgctggcattaactaccgacgttttactctgccacttatcattcaacaaggcaggccaggccgcgctggcagacattcgatacccggcgctcaggctatcacccagaatcaataacgtgtccgctgcggcggcacggaaggttaacaggaccaggaacaggaagggcaaatgccagcggaaaacattgttgaagttcatcatcttaagaagtccgtcggtcagggggagcatgaactctccatcctcaccggagttgagctggttgtcaaacgtggcgagaccatcgcactggtgggcgagtcgggatcgggtaagtcaaccttgctggcgatcctcgccgggcttgatgacggcagcagtggcgaagtgagtctggtgggacaaccgctacataatatggacgaagaagcgcgggcaaagttgcgcgcgaagcacgtcggctttgtttttcagtcatttatgttaattcctacccttaacgcgctggaaaacgtcgagcttccggctctgctgcgcggtgagagtagcgcggaaagtcgtaacggggcgaaagcgttgctcgaacagttagggctgggtaaacgtctggatcatcttccggcacagctttccggcggtgaacagcaacgagtggcgctggcacgagcctttaatggtcgacctgatgtgctgtttgccgacgaacccaccggcaaccttgaccgccagacgggcgataaaattgccgacctgctgttttccctcaaccgtgaacatggcaccacgttgattatggtgacccacgacctgcaactggcggcacgctgcgaccgctgcttacggctggtgaacgggcagttgcaggaggaagcatgattgcacgttggttctggcgcgaatggcgttcgccgtcgctattaattgtctggctggcgctaagcctggcggtggcctgcgtgctggcgctgggcaatatcagcgatcgcatggagaagggcttaagccagcaaagccgtgagtttatggcgggcgatcgggcgttgcgcagttcacgcgaagtgccgcaagcgtggctggaggaagcgcaaaagcgcggcctgaaagtcggcaagcagctgactttcgccacaatgacctttgcaggcgacacaccgcagctggcgaacgtcaaagcggtggatgatatctacccgatgtatggcgatctgcaaactaatccccctggcctgaaaccgcaggcgggcagcgtattgctggccccacgcctgatggcactgcttaacctgaaaacgggcgacaccattgacgtgggcgatgccaccttgcggattgccggagaagtgattcaggaaccggattccggttttaaccccttccagatggctccgcgtctgatgatgaatctggcggatgtcgataaaaccggagccgtgcagccggggagtcgggtcacctggcgttataaattcggcggcaacgagaaccagctcgacggctatgagaaatggttgttacctcagcttaaacccgaacaacgctggtacggtctggaacaggacgaaggcgcgctggggcgatcgatggaacgctcgcaacagttcctgctgctttcggcgcttctgaccttgctgctggcagtggcagcggtggcggtagcgatgaatcattactgtcgcagtcgctacgatctggtggcgatcctcaaaacgctgggggcagggcgagcgcaactgcgtaagctaatcgtcggtcagtggttgatggtgctgacgctttcagccgttaccggtggggccataggcctgttgttcgaaaacgtgttgatggtgctgctcaagcccgttctgcctgctgcactaccgccagccagcctctggccgtggctgtgggcgcttggcaccatgacggtcatctcgctgctggtggggctacgaccatatcgcttgttgctggcaacgcagcctttacgcgtattacgtaatgatgtggtagcgaacgtctggccgctgaagttttatctgccgattgtcagtgtggtggttgtgctgctgctcgccggattaatgggtggcagcatgctgctttgggcggtgctggcgggcgcggtagtactggctttgctgtgcggtgtgctgggctggatgctgctgaatgtacttcgccgcatgacgctgaaatcgctgcctctgcgcctggcggttagccgcctgttacgtcagccgtggtcaacgttaagtcagctttcggcattttcgctctcctttatgctgctggcactgctgctggtgttgcgtggcgatctgctcgaccgctggcagcagcagctacctccagaaagcccgaactactttttaattaacatcgccacagaacaggtagcaccgctaaaagcgttcctcgcggaacatcagatagtcccggaatcgttttatccggtggtgcgggcgcggctgacggcgattaacgataagccgacagaaggtaatgaagatgaggcgcttaaccgcgaactcaatcttacctggcaaaatacgcggcccgatcataatccgattgtcgccggtaactggccgccaaaagccgatgaagtgtcgatggaagaggggctggcgaaacgcttaaacgttgccctcggtgataccgtgacttttatgggcgatacccaggagttccgcgctaaagtgaccagcctgcgcaaagtggactgggaaagtctgcggcctaatttctattttattttccctgaaggggcattagacgggcaaccgcagagctggcttaccagtttccgctgggagaatggcaacggcatgttgacacaactcaaccgccagttcccgaccattagcctgttagatattggcgcgattttaaaacaggtcggtcaggtgctggagcaggtaagtcgggcgctggaagtgatggtggtactggtcaccgcctgcggtatgttgctgttgctggcacaggtgcaggtgggaatgcgtcagcgtcatcaggagctggtggtgtggcgcacactcggtgcggggaaaaaactgctgcgtaccacgttgtggtgtgagttcgccatgcttgggtttgtttccggcctggtggccgcaattggtgcggaaacggcgctggcagtgttgcaggcgaaagtgtttgattttccgtgggagccagactggcgattgtggattgttctgccgtgcagcggagcgctgctgctgtcgcttttcggcggctggctgggtgcgcgactggttaagggtaaggcgctgttcaggcagtttgcggggtgatgagagtaaataaggggcgttctggttgaatggaacgccttgtttaaattaattctacaatatgtttcattgatgatgttattgaattggtgatttcctatctttctattgctgatattaatctgaatcggtggagtttattgattttaaatatagccctacaaaaataactcagactaataaaatcataaatcatatgcgttgaatggatattatccatatagtgaatttgttgatgatgaattcatctgtgctaaaaatgttagtttaataaaatattgaaagtgacctgtaataacagttgttgttgattgagaacaaataagtttatgtgaaaaatatataaatacattagctggtcttgtgtgtcattttatttttttttgttgctaacacagggatatgaacaataactaaaagggcactttatatgagcggaaaaccagcggcgcgtcagggagatatgactcagtatggcggtcccattgtccagggttcggcaggtgtaagaattggcgcgcccaccggcgtggcgtgctcggtgtgtccgggcgggatgacttcgggcaacccggtaaatccgctgctgggggcgaaggtgctgcccggcgagacggaccttgcgctgcccggcccgctgccgttcattctctcccgcacctacagcagctaccggacgaagacgcctgcaccggtgggcgttttcggccccggctggaaagcgccttctgatatccgcttacagctacgtgatgacggactgatactcaacgacaacggcgggcggagcattcactttgagccgctgctgccgggggaggcggtgtacagccgcagtgagtcaatgtggctggtgcgcggtggtaaggcagcacagccggacggccatacgctggcgcggctgtggggggcgctgccgccggatatccggttaagcccgcatctttacctggcgaccaacagcgcacaggggccgtggtggatactggggtggtctgagcgggtgccgggtgctgaggacgtactgccagcgccgctgccgccgtaccgggtgcttaccgggatggcggaccgcttcgggcggacgctgacgtaccggcgtgaggccgccggtgacctggccggggaaatcaccggcgtgacggacggtgccgggcgggagttccgtctggtgctgaccacgcaggcgcagcgtgcggaagaggcccgcacctcttcgctatcttcttctgacagttcccgccctctctcagcctcagcgttccccgacacactgcccggtaccgaatacggccccgacaggggtatccgcctttcggcggtgtggctgatgcacgacccggcatacccggagagcctgcccgctgcgccactggtgcggtacacgtatacggaagccggtgaactgctggcggtatatgaccgcagcaatacgcaggtgcgcgctttcacgtatgacgcgcagcacccgggccggatggtggcgcaccgttacgcgggaaggccggagatgcgctaccgctacgacgatacggggcgggtggtggagcaactgaacccggcagggttaagctaccgctatctttatgagcaggaccgcatcaccgtcaccgacagcctgaaccggcgtgaggtgctgcatacagaaggcggggccgggctgaaacgggtggtgaaaaaagaactggcggacggcagcgtcacgcgcagcgggtatgacgcggcaggaaggctcacggcgcagacggacgcggcgggacggaggacagagtacggtctgaatgtggtgtccggcgatatcacggacatcaccacaccggacgggcgggagacgaaattttactataacgacgggaaccagctgacggcggtggtgtccccggacgggctggagagccgccgggaatatgatgaaccgggcaggctggtatcggagacatcgcgcagcggggagacagtacgctaccgctacgatgacgcgcacagtgagttaccggcgacgacaacggatgcgacgggcagcacccggcagatgacctggagccgctacgggcagttgctggcgttcaccgactgctcgggctaccagacccgttatgaatacgaccgcttcggccagatgacggcggtccaccgcgaggaaggcatcagcctttaccgccgctatgacaaccgtggccggttaacctcggtgaaagacgcacagggccgtgaaacgcggtatgaatacaacgccgcaggcgacctgactgccgttatcaccccggacggcaaccggagcgagacacagtacgatgcgtggggaaaggcggtcagcaccacgcagggcgggctgacgcgcagtatggagtacgatgctgccggacgtgtcatcagcctgaccaacgagaacggcagccacagcgtcttcagttacgatgcgctggaccggctggtacagcagggcggctttgacgggcggacgcaacgttatcattatgacctgaccggaaaactcacacagagtgaggatgagggacttgtcatcctctggtactacgatgaatcggaccgtatcactcaccgcacggtgaacggcgaaccggcagagcagtggcagtatgatggccacggctggctgacagacatcagccacctgagcgaaggccaccgtgttgccgtccactatggctatgacgataaaggccgcctgaccggcgaatgccagacggtggagaacccggagacgggggaactgctgtggcagcatgagacgaaacacgcatacaacgagcaggggctggcaaaccgcgtcacgccggacagcctgccgccggtggagtggctgacgtatggcagcggttacctggcgggaatgaagctgggcgggacgccgctggtcgagtatacgcgggacaggctgcaccgtgagacggtgcgcagcttcggcagcatggcaggcagtaatgccgcatacgaactgaccagcacatacacccccgcaggccagttacagagccagcacctgaacagcctggtatatgaccgtgactacgggtggagtgacaacggcgacctggtgcgcatcagcggcccgcgacagacgcgggaatacggctacagcgccacgggcaggctggagagtgtgcgcaccctcgcaccagacctggacatccgcatcccgtatgccacggacccggcgggcaaccggctgccggacccggagctgcacccggacagtacactcacagtgtggccggataaccgcatcgcggaggatgcgcactatgtctaccgccacgatgaatacggcaggctgacggagaagacggaccgcatcccggcgggtgtgatacggacggacgacgagcggacccaccactaccactacgacagccagcaccgcctggtgttctacacgcggatacagcatggcgagccactggtcgagagccgctacctctacgacccgctgggacggcgaatggcaaaacgggtctggcggcgggagcgtgacctgacggggtggatgtcgctgtcgcgtaaaccggaggtgacgtggtatggctgggacggagacaggctgacgacggtgcagactgacaccacacgtatccagacggtatacgagccgggaagcttcacgccgctcatccgggtcgagacagagaacggcgagcgggaaaaagcgcagcggcgcagcctggcagagacgctccagcaggaagggagtgagaacggccacggcgtggtgttcccggctgaactggtgcggctgctggacaggctggaggaagaaatccgggcagaccgcgtgagcagtgaaagccgggcgtggcttgcgcagtgcgggctgacggtggagcaactggccagacaggtggagccggaatacacaccggcgcgaaaagctcatctttatcactgcgaccaccggggactgccgctggcgcttatcagcgaagacggcaatacggcgtggagcgcggaatatgatgaatggggcaaccagcttaatgaggagaacccgcatcatgtgtatcagccgtaccgtctgccagggcagcagcatgatgaggaatcagggctgtactataaccgtcaccggtactacgatccgttgcaggggcggtatattactcaggacccgatggggttgaaagggggatggaatttatatcagtatcctttaaatccactacaacaaattgaccctatgggattattgcagacttgggatgatgccagatctggagcatgtacggggggagtttgtggtgttctttcacgtataataggaccaagtaaatttgatagtactgcagatgctgcgttagatgctttgaaagaaacgcagaatagatctctatgtaatgatatggaatactctggtattgtctgtaaagatactaatggaaaatattttgcatctaaggcagaaactgataatttaagaaaggagtcatatcctctgaaaagaaaatgtcccacaggtacagatagagttgctgcttatcatactcacggtgcagatagtcatggcgattatgttgatgaatttttttcaagtagcgataaaaatcttgtaagaagtaaagataataatcttgaagcattttatctcgcaacacctgatggacgatttgaggcgcttaataataaaggagaatatatttttatcagaaatagtgtcccgggattgagttcagtatgcataccgtatcatgattaattttagtgcttttattagtggggcctataaggagattcaatgaaatatagttcaatattttcgatgctttcattttttatactatttgcctgtaatgagacagctgtttacggttctgatgaaaacattatttttatgaggtatgtggaaaaattacatttagataaatactctgttaaaaatacggtaaaaactgaaacaatggcgatacaattagctgaaatatatgttaggtatcgctatggcgaacggattgcagaagaagaaaaaccatatttaattacggaactaccagatagttgggttgttgagggagcaaagttaccttatgaagttgcgggtggtgtatttattatagaaattaataagaaaaatggatgtgttttgaatttcctacatagtaaataatgctggcgctgatggatgcggatggaaacattgcgtggagcggggagtatgatgagtggggcaaccagctgaatgaagagaacccgcatcacctgcaccagccgtaccggctgccggggcagcagtatgataaggagtcggggctgtactacaaccggaaccggtactacgatccgttgcaggggcggtatatcactcaggacccgatagggctggaggggggatggagtctgtatgcgtatccgctgaatccggtgaatggtattgatccattagggttaagtcccgcagatgtagcgctaataagaagaaaagatcaactaaaccatcaaagagcatgggatatattatctgatacttatgaagatatgaagagattaaatttaggtgggactgatcaatttttccattgtatggcattttgtcgagtgtctaaattaaatgacgctggtgttagccgatcggcgaaagggctgggttatgaaaaagagattagagattacgggttaaatctgttcggtatgtacggcagaaaagtaaagctatcccattctgaaatgattgaagataataaaaaagacttggctgtaaatgaccatgggttgacatgtccatcaacaacagattgctcagatagatgtagtgattatattaatccagagcataaaaaaacgataaaggctttacaagatgctggctatctcaagtaatctatcaaagatgataatatttatttttgctattataatcattgttgttttatgcgtaattacttatctttatttatacaaagatgaatctcttgtaagtaaacattacataaactatatggcaataccagaaaatgatggagtttttacatggctcccagatttttttccgcacgtagcggtggatatatcaatatacacaaatgtagaagatgattatttttttcttatttttccctaacaaatgatgatgggggtaggtttaagaaaacattgacagtgagggccagggaacaagtggcgaaaatcgtatcaaagaatgatccagatacaaaaaaagtgtggtgtaaatatggtaagataccagggcaaggggatggtgtaaaccttttttttgttggtgaaattaatgttacgcattattttataacaaatattggagctggattgcctgatgcttgtgcagagtaattgcttgaattaagagtctatcccatatcgaagtcgtcaacttcgtagtgaggaaaagtaaaattcctgactgagaaaagacatgtcggctattgtgtaaagccatatagctcagacgatgaatatctactcgtattcagttgtttattgagggtgagttccgaccctgaaacaacaaataaaatgaacagtcagagagtttacatagaattgcactggtcttttacgatatctgacattgtgtaatacatattcagccatgcattaattaaaatgttacgtgtttaatgtgagtccctatctgaaaataaataatccttccggattaaaataaattcttgccgggaaagaaagaggaaataaaccattagcggaaaaccagcggcacgccagggtgacatgccccagtacggcggcccgatagtccagggttcagcgggggtactgatagtcgcgccgactgcatcgagaactccatacaactttttacggaacgtcacctgataaaatttgttcagtatcgtcttttgagattctcaaggttatggagtaaccagacagaacggacaccactgtcggagataaaaaccccctgtttacgcagctcgttgctggcccggtgctgaccatgtgtcgggaaagcgacggcgtaatcaacaacagcctgttcagttgcctcatcggtacggttcttaaggttaggagcgcggcgactacgattaatctgcgcatccacaccgccttcagcgaccagttcgcggtaacgataaaacgtatcacgcgaaacgcccatgattttacaggcttttgatacgttgctgagttcttcagccagattgagcaaaccggctttgtgtttgatgacgggattggcagtatgaagcatgagagttacctcttgttttggataaggattcgacactcatatcaaaaccggtaactctcaacctttcaaggccatgtgtcagatcaagtcgcgactaatacaaatacgtccctcattaccgcgccttaacccattccgccacttccgcccactcaccgcgaaagacaactttttccgcttttttctcaagctgatagcgatacatcgggtcgtaatattcttcaagtaacggcaccagccaggccagatgaccgtcggtgctgccggtggtgagttgcgttgtcagtgctgcatccagccttgcagccagttcgttatagcgctgtagccccagccgacgcttaatcgccgaaagtccgtgatgcaggtattcgcaatactcctgccagccctgttcgtcgccgtacgcgtgggtaaaatcatgatgcatacgcaagaaatactcttcgttcaggcgctcaagacggatctcaaacggatcttctaccaccgcaatcgccgcctgagtcattcgctcgcgcaggcattccggcaggtgattcgaaccgatcatccggctttcgtcttccagcacccacaggcgcaaattctgacgggcgtcggtttttagcatttcggcagccagcaggttttcaaaactcgcctggctaagttgtggttgtaacgtgcgaccaaacgccgaaccgcgatgacgcgccaacccttccagatcaacaccgttcggctgttgctgcactaacagcgttttaccgctgccggtacaaccgccaatcagcactatcggtttttgtgccagttcaatagtcgcctgaatcgcggtctggcgcagtgccttataaccgccttccaccagcggataatcaatccccgctgcatgcaaccagctttgcacaatatgtgagcgctgaccgccacgggcgcagcagagaataccttgcggattttgcaggcacgctgcccgccaggcgtccatgcgctgctgacgaatttcacccgccaccagtttatgtcccagcgccagcgctgcgtctgagccttgctgtttatagcaggtgccaacggcggcgcgttcatcgttattcattaacggcagattgatagcggcgggcattgcgccgtgctcaaactcgataggggcgcgaacatcaataatgggcgtatcagcaatcagcagggcacgatagtcctgttccgtgtgtctctcttgcatagttaaaagtgaacctcaaatcagcttgcgcgctattttacgcgccaacgcgcaaggaaacttgatttttaactgcgtgggttgccgaaaatttctaaaaatccgctgatttccggcctgcgctgggtaaacaaggtcacaatatcttctaccgctttgccgctgccaaatttgcgccatgccagactcaatggcgaaggagggcgcatcgttgggattacccggctgaccagttgttgattatcgatcattgactggcaaagcgattttggcaaaaaaccaatgccaacgcccgccagatgggcggcgattttcgtttccatatcgggaacaataatctctttttgccctggcaatcgccaggcgacgcgtttggttaaggtgcgggcgctgtcttcaatattgaccgccggaaagcgccgcaactgcgcttctgttagcggctcttcaacgttcgccagcggatgatccgccgccatgacaaagcgccattgcaccgatcctaagggatcaagactaaaggtatttgccagcgcctcagttcccgtgacgccgatagccagcgaaaaaccttcgtacaatagcgagtcccagacgcccatatagatttgtcgggagatgtgaaactgggtaaaggggtaacgctcattcagccacgccagcaactgggcgacggcctgggggttgtagagcaggttgttgatgacaatattcacctggcgttccacgccatcattcacctgttgcagctcgcttggcatactttccagccagctcagccagtctctggcctgggaaagtagatgctcgccagccgctgtcaacgtcacgctgcgagtcgtacggaaaaacagcgctactccggtattctcttccagaagtttaatgcgataactgatcgtcgccgtggttttacataatcgttctgccgcttttgaaaaacttcctgtttcagcaaccgcaatgaaagtccgcaaggtttctggatcgaacatcttcaggtatccccttttaaatccgcaagttgcgtgattttcttatcctctgatttatcagtatttttacatgataaccctgttcaatttgtggactaaatctagttttggaaaaatattccaacttttgtattgatgttgttctcttaaggttttagattgcctgttattgaaaccaagctgaccggtcggcggtggttgaacggaattatgttacaaggacaaaaagatgaaacttcaggtattaccgttaagtcaggaagcctttagtgcttatggcgacgtaatcgaaacgcagcaacgggattttttccatattaacaatggcctggtggagcgttaccacgatttggcgctggttgagattcttgagcaagactgtacgcttatcagcattaaccgcgcgcaaccggcgaatctgccgctgaccattcacgaactcgaacgtcatccgctgggtactcaggcctttatcccgatgaaaggtgaggtgtttgtggtggtcgtggcgttaggtgacgacaaaccagacctgtcaacgctgcgggcgtttatcaccaacggcgaacagggagtgaattaccatcgtaacgtctggcatcacccacttttcgcctggcagcgcgtcaccgattttctgaccatcgatcgcggcggcagtgacaactgtgatgttgaaagtattcctgaacaggaactctgttttgcgtgacgcctgcaaccgacttgcataagataaactaattgttcattgtttatgctcacttgtaggtcggagttaacgtaggtatgacggaagttagacggcgcggcaggccaggacaggcggagcctgtggcacagaagggcgcacaggcgttagagcggggaattgcgattctgcaatatttggaaaaaagtgggggaagttcgtcggttagcgatatttctctcaatctggatttgccgctctccacgacctttcgcttgctgaaggttttacaggcagcggattttgtctatcaggacagtcaattaggctggtggcatataggattaggtgtctttaacgtcggtgcggcgtacatccataaccgcgatgtcctctccgtcgccgggccgtttatgcgccgcctgatgttactttccggcgaaacggtcaatgtcgcgatccgtaacggcaatgaagcggtattaattggtcagttagagtgtaaatcgatggtcaggatgtgtgcgccactgggcagtcgtctgccactgcatgcttccggtgcgggcaaagcgctgctttatccgctggcggaagaggagttgatgagcatcattctgcaaaccggtttgcagcagtttacgccaactacgcttgtggatatgcccaccttgctgaaggacctggaacaagcgcgtgaactgggctataccgtagataaagaagagcatgttgtaggtctgaattgcatagcttcagcaatttacgatgatgtcggtagtgttgttgccgctatctccatctccgggccttcatcaagactgacagaagatcgttttgtcagtcagggtgagctggtcagagacaccgcccgcgatatcagcacggcgttgggactgaaagcacatccataatgtctgtcgcatcccgctctgcggagcgggtttttttgacaaaatttgaaagttggaaaaattttccaataaatagaggtaggaataaaatggcaaaaatgagagccgttgacgcggcaatgtatgtgctggagaaagaaggtatcactaccgccttcggtgttccgggagctgcaatcaatccgttctactcagcgatgcgtaagcacggcggtattcgtcacattctggcgcgtcatgtggaaggtgcttcgcacatggcggaaggttatacccgcgcaacggcagggaatatcggcgtatgtctggggacttccggtcctgcgggcacggacatgatcaccgcgctctattccgcttctgctgattccattcctattctgtgcattaccggccaggcaccgcgcgcccgtctgcataaagaagattttcaggccgtagatattgaagcaattgctaaaccggtcagcaaaatggcggttacagttcgtgaagcggcgctggtgcctcgcgtgctgcaacaggcatttcacctgatgcgttctggtcgtccgggtccggtactggtggatttaccgttcgacgttcaggttgcggaaatcgagtttgatcctgacatgtacgaaccgctgccggtctacaaacctgctgccagccgtatgcagatcgaaaaagctgtagaaatgttaatccaggccgaacgtccggtgattgttgccgggggcggggtaattaatgctgacgcagctgcactgttacaacagtttgctgaactgaccagcgttccggtgatcccaacgctaatgggctggggctgtatcccggacgatcatgaactgatggccgggatggtgggtctgcaaaccgcgcatcgttacggtaacgcaacgctgctggcgtctgacatggtgtttggtatcggtaaccgttttgctaaccgtcataccggctcggtagagaaatacaccgaagggcgcaaaatcgttcatattgatattgagccgacgcaaattggtcgcgtgctgtgtccggatctcggtattgtctctgatgctaaagcggcgctgacactgctggttgaagtggcgcaggagatgcaaaaagcgggtcgtctgccgtgtcgtaaagaatgggtcgccgactgccagcagcgtaaacgcactttgctgcgcaaaacccacttcgacaacgtgccggtgaaaccgcagcgcgtgtatgaagagatgaacaaagcctttggtcgcgatgtttgttatgtcaccaccattggtctgtcacaaatcgctgcggcacaaatgctgcatgtctttaaagaccgccactggatcaactgtggtcaggctggtccgttaggctggacgattccggctgcgctaggggtttgtgccgctgatccgaaacgcaatgtggtggcgatttctggcgactttgacttccagttcctgattgaagagttagctgttggcgcgcagttcaacattccgtacatccatgtgctggtcaacaacgcttatctggggctgattcgtcagtcacaacgcgcttttgacatggactactgcgtgcaactcgctttcgagaatatcaactccagtgaagtgaatggctacggtgttgaccacgtaaaagtagcggaaggtttaggttgtaaagctattcgggtcttcaaaccggaagatattgcgccagcctttgaacaggcgaaagccttaatggcgcaatatcgggtaccggtagtcgtggaagttattctcgagcgtgtgaccaatatttcgatgggcagcgaactggataacgtcatggaatttgaagatatcgccgataacgcagcggacgcaccgactgaaacctgcttcatgcactatgaataagggagataaataatgttacgtttctctgctaatttatcgatgttatttggagaatatgattttctcgcccgttttgagaaagctgcgcagtgtggttttcgcggcgttgaatttatgtttccttatgactacgacattgaagaattaaaacatgtgctggcgagtaataaactcgaacatacgctgcacaatttaccggcgggtgactgggcggcgggggagcgcggtattgcctgtattcctggccgtgaagaagagtttcgggatggcgtagcagcagcgattcgttatgcccgtgcgctgggtaataaaaaaattaactgtctggtcggtaaaacgccggctggtttcagcagtgaacagattcacgcaacgcttgtagaaaacctgcgttatgccgcgaatatgctgatgaaagaagatattttattactgattgaacctattaaccattttgatattcctggtttccatctcaccggaactcggcaggcgctgaaattgattgatgatgttggttgctgcaatttgaaaattcagtatgacatttatcatatgcagcggatggaaggtgaattaaccaacaccatgactcagtgggctgataaaattggtcacctgcaaattgccgataatccgcatcgcggcgaaccgggaaccggagaaattaattatgattatctctttaaggtaatcgaaaattctgactacaacggttgggttgggtgtgaatataaaccccaaaccaccacggaagccggtttacgctggatggatccgtaccgttaaaacgtaacgctattcagacaatgcttttttaggccgctaagttggcaggggatcgtgttgtctgaattcaggaaaagcgaaatttaaaagaggttaattatgaaactgggatttattggcttaggcattatgggtacaccgatggccattaatctggcgcgtgccggtcatcaattacatgtcacgaccattggaccggttgctgatgaattactgtcactgggtgccgtcagtgttgaaactgctcgccaggtaacggaagcatcggacatcatttttattatggtgccggacacacctcaggttgaagaagttctgttcggtgaaaatggttgtaccaaagcctcgctgaagggcaaaaccattgttgatatgagctccatttccccgattgaaactaagcgtttcgctcgtcaggtgaatgaactgggcggcgattatctcgatgcgccagtctccggcggtgaaatcggtgcgcgtgaagggacgttgtcgattatggttggcggtgatgaagcggtatttgaacgtgttaaaccgctgtttgaactgctcggtaaaaatatcaccctcgtgggcggtaacggcgatggtcaaacctgcaaagtggcaaatcagattatcgtggcgctcaatattgaagcggtttctgaagccctgctatttgcttcaaaagccggtgcggacccggtacgtgtgcgccaggcgctgatgggcggctttgcttcctcacgtattctggaagttcatggcgagcgtatgattaaacgcacctttaatccgggcttcaaaatcgctctgcaccagaaagatctcaacctggcactgcaaagtgcgaaagcacttgcgctgaacctgccaaacactgcgacctgccaggagttatttaatacctgtgcggcaaacggtggcagccagttggatcactctgcgttagtgcaggcgctggaattaatggctaaccataaactggcctgatacccgcaataaaaatggccgatatcagaaaatgaatcggccagcaatattaaaaaagaaagcagccaaagatgttgcttcagtattaaaaataatatttttattttatttgttcctcatagctagattaaaacaacgttattcgatacgtgaaattaagagggatttatggaacatcagagaaaactattccagcaacgcggctatagcgaagatctattgccgaaaacgcaaagccagcggacctggaaaacatttaactattttaccttatggatgggttcggttcataacgttcccaattatgtgatggtcggcggcttttttattctcggcttgtctacctttagtattatgctggcaattatcctcagcgcctttttcattgccgcggtaatggtattaaacggtgctgcgggcagtaaatacggtgtgccttttgccatgatcctgcgtgcttcttacggtgtacgtggtgcactgtttcccggattattaaggggcggaattgccgccatcatgtggtttggtttgcaatgttacgcggggtcactggcctgcttgattctgattggcaaaatctggccgggatttttaactctcggtggtgatttcactctgttaggcctttctctaccgggcttaattactttcttaatcttctggctggtcaacgttggtataggttttggcggtggcaaagttttaaataaattcactgccattcttaacccgtgcatctatatcgttttcggcggtatggcgatttgggcgatttcactggtcgggatcggtccaatctttgactacattccgagcggtattcagaaagcagaaaacggtggcttcctgttcctggtggtgattaacgcggtagttgcggtctgggcggcaccggcggtgagcgcatccgactttacgcaaaacgcccactcgtttcgtgagcaggcgctggggcaaacgctgggtttagttgtggcctatattctgtttgcggtcgccggggtatgtattattgccggagccagtattcactacggcgctgatacctggaacgtgctggatattgttcagcgttgggacagcctgttcgcctcgttctttgcggtactggttattctgatgacaactatctccactaacgcgaccggtaatattattccagccggttatcagattgccgccattgcaccgacaaaactgacctataaaaacggcgtactgattgccagtattatcagcttgctgatctgcccgtggaaattaatggaaaatcaggacagcatttatcttttcctcgatattatcggcggaatgcttggtccggtaattggtgtcatgatggcgcattattttgtggtgatgcgcggacaaattaatcttgatgaactgtataccgcacctggcgattataaatattacgataacggttttaacctcactgcgttttcagtaactctggtggccgttattttatctcttggcggtaagtttattcactttatggaaccgttatcgcgtgtttcatggtttgtcggcgtcatcgtcgcctttgcggcctacgccttattaaagaaacgtacaacagcagaaaaaacaggagagcaaaaaaccataggttaattaatcccgatattgaacattgagttaaaaaccaatctgtattttacaaggagtttgttatgtcttttgatttaatcattaaaaacggcaccgttattttagaaaacgaagctcgcgttgtagatatcgccgttaaaggcggaaaaattgctgctatcggtcaggatctgggcgatgcaaaagaagttatggatgcgtctggtctggtggtttcgccgggcatggttgatgcgcacacccatatttctgaaccgggtcgtagccactgggaaggttatgaaaccggtactcgcgcagcggcaaaaggtggtatcaccaccatgatcgaaatgccgctcaaccagctgcctgcaacggttgaccgcgcttcaattgaactgaagttcgatgccgctaaaggcaagctgactattgatgcggcacaactcggtggcctggtgtcttacaacatcgaccgtctgcatgagctggatgaagtgggcgttgtcggcttcaaatgcttcgttgcgacctgtggcgatcgcggtatcgacaacgacttccgtgatgtaaacgactggcagttcttcaaaggtgcgcagaagctgggcgaactgggtcagccggtgctggtgcactgcgaaaacgcgctgatttgtgacgaactgggcgaagaagcgaagcgtgaaggtcgcgtaaccgctcatgactatgtggcttcgcgtccggtatttaccgaagtggaagcaattcgccgcgtactgtatctggcgaaagttgctggttgccgtctgcacgtttgccacgtcagcagcccggaaggtgttgaggaagtgactcgtgcacgtcaggaaggtcaggacgttacttgtgaatcctgcccgcattactttgtactggataccgatcagttcgaagaaatcggtactctggcgaagtgttcaccgccgatccgcgatctggaaaaccagaaaggcatgtgggaaaaactgtttaacggtgaaatcgactgcctggtttccgaccactctccatgcccgccggaaatgaaagccggtaacatcatgaaagcatggggcggtatcgccggtctgcaaagctgcatggacgtgatgttcgatgaagcggtacagaaacgcggtatgtctctgccaatgttcggcaaattaatggcgactaacgcagcagatattttcggtctgcagcaaaaaggccgtatcgccccaggaaaagatgccgacttcgtcttcattcagccgaatagcagctatgttcttaccaatgacgatctggaatatcgccacaaagtcagcccgtatgttggccgtaccattggcgcgcgtatcacgaaaaccatcttacgtggtgatgtgatttacgacattgaacagggcttccctgttgcgccgaaaggtcaatttatccttaaacatcagcagtaatctggcccctgcaatgcccgtccttgcggcgggcattctccggttaaggtgtgtttatgttcaattttgcagtcagccgcgaaagcctgttatcaggatttcagtggtttttctttattttttgcaacacggttgtggttcctcctacgctactttctgcttttcagttgccgcaaagtagcctgcttacgctcacgcaatatgcttttcttgctaccgcactggcctgcttcgctcaggcgttttgcggtcatcgtcgcgctattatggaagggccaggtggcctgtggtggggaaccatccttactatcacccttggtgaagcatcgcgcgggacaccgatcaacgatatcgccaccagcctggcagtggggattgcactctccggcgtgctgacgatgttgattggttttagcggattaggccatcgcctggcacggttatttacgccgtcggtgatggtcttgtttatgttgatgctgggcgcgcagctgaccactatctttttcaaaggtatgctcgggctgccgtttggcatagccgacccgaattttaaaattcagttaccgccgttcgcgctctcggtggcggtgatgtgcctggtactggcgatgattatcttcctgccgcaacgttttgcccgttatggcctgctggtcggcaccataaccggctggttgttgtggtacttttgctttccttcttcgcactcgctctccggtgagttgcactggcagtggttcccgctcggcagtggcggtgctttgtcgccgggaattattctgacggcggtgattacaggtctggtaaatatcagcaatacctacggtgcgattcggggcacggatgttttttatccgcagcagggcgcagggaatacgcgttatcgtcgtagctttgtggcgaccggatttatgacgctgataaccgtaccgctggcggtaattccattttcaccgtttgtttcatccattggtttattaacccagactggcgattacacgcggcgttcgtttatttatggcagcgttatttgcctgctggtggcgctggttcctgcactcacgcgactgttttgcagtatccctttacccgtgagtagtgcggtcatgctggtttcttatctgcctttactcttttccgcgctggtgtttagccagcaaataacgtttaccgctcgcaatatttatcgactcgcattgccgttatttgtcggcatatttttaatggcattaccgcctgtgtatctgcaagaccttccattaacgcttcgtcctctgctcagtaacggcttattggtcgggattttactggctgttcttatggataaccttattccgtgggaacgcatcgaataatttgttgaaaaaggattgataatgaagattgtcattgcgccagactcttttaaagagagcttaagtgcagaaaaatgttgtcaggcaattaaagccgggttttcgaccctctttcccgatgcgaactatatctgtttgccgatagcggatggcggcgaagggacggtggatgcgatggtcgccgcgacgggcggcaacatcgtgacgcttgaagtctgcgggccgatgggcgaaaaagtgaatgctttttatggccttaccggcgacgggaaaacggcggtgattgagatggcggcagcaagtggcctgatgctggtcgcgcctgaaaagcgtaatccgttgctggcctccagttttggtacgggggagttaattcgtcatgcgctggataacgacattcgccatattattctcggcattggcggcagtgcgacggtcgacggcggtatgggcatggcgcaggcgctcggtgtgcgtttccttgatgccgacggtcaggcgctggcggcaaacggtggtaatttagcgcgcgtggcaagcattgagatggatgaatgcgatccgcgtctggcgaattgccatattgaagtagcatgtgacgttgataacccgctggtaggggcacgcggcgcggcggcggtgtttggcccgcaaaaaggggcaacgccggagatggtcgaagaacttgaacaggggctgcaaaattacgcccgtgttttacaacagcaaactgaaattaatgtctgccagatggcgggcggcggcgctgcgggcggtatgggtattgcggcggcggtatttctcaatgcggatattaaaccgggcattgaaattgtgttgaatgcggtcaatcttgcgcaggcagtgcagggcgcagcactggtgattaccggggaagggcgcatcgactcgcaaacggcaggcggtaaagcgccgctgggtgtggcgtcggtggcgaagcagtttaatgtaccggtgattgggattgctggcgtattgggtgatggcgtggaagtggtgcaccagtacggcattgacgcggtattcagcattttgcctcgtctggcacctttagccgaagtgctcgccagcggtgaaaccaatctcttcaacagcgcgcgaaatattgcctgcgccattaaaataggtcagggaattaaaaactaacccttacctttaaagcggatgcgatttatatcgcataagagtgcagtactcatgccggatgcggcatgagtaccatatccttcctgaaaatcgcgcaaattctatatattgcagagatcatgtaggcctgataagcgaagcgcatcaggcaatgttacaaaaaaagccacggtataaaccgtggcaaaatccaacatagctaaaaataatcaggcgagtggtatgacttaaatctctacgtcgcggttacaatctttcgagtaaatatagctgaacgcttcaccacgccctacaccataaccagcctgtaaagaataagcgcccataaagatgtaatcgccttttttcaccgggatccagttattgtcgaggttataaaccccctgaccggaaagaatataggcaccgtgttcctgaacgtgtgtttcgatataaccgtggctggcacctggtgcaaaagagaggatatgcatgttcatatcaaaacctaactctttgggcagaaaatccagcagaataacatcgtccatgccttcataatgaatgcgttccagttcgctggcattgccagaaaccagccacggtgcatagccttctaccggaacatagcggcgcttatataaaaagatttggctgtcttcggcctgggcgttaacaaacgtcattaaggagcctggcgggcaataaagatagccaccttcgcttaaggcaaatgttttgccttcggctttggcagtgatatttccagagatcacatacaggaacgtttcaatgccttcgccaccgaagccctgttggttgccaccgttttgatgcagtgtgaccagataatcaacaaaagaggcacccagctttggcgtggagaggattgtcgcgtcacaattttcaaagcccggaataatattttttaccagaccatccggggttaacagtgcgaaattaccgtgtttaacaatcgcacggttagccagtaaatcttcgcggtaaccggtgacgttatttaaatatcccatttatgactccttatttctgccaggcaagttgataaagcatgagtgccaacgttttgaccccttcggcaaggtcggtaatattggtgcgttccgccgggttatggctgatcccgttgatgctggggataaaaatcatgcaggttggtacgcgaggcgcgaaaatttgcgcgtcgtgcccggcaccactgtgcatcacccggtaattcagtttttctctttcacacaattctgtcagggtggcgaccagctccttattcatcggcacgggttcttcgtccatccataaatcgatatcaataccaatgtccatttcatcgcaaatcgcccgcatgtcgttttctaactgttgggtgaaatcgcgcagcacggcagcgtcggtatgacgacaatcaatggtgaacgtggttttacccggcaccacatttaccgtattcgggcgcggctctactttgccaaaggtcagaaccagcggatcgcccatccttttcgctttttcgaccgactgatggcaaatgcgactgaaagcgtaaactgtatcacgacgataacccatcggcgtggtgcctgcatggtttgattcgccgttcagcgttaccgtataacgacgctgcccgacaattgcattcaccacgccaattgattgcccattactttccagcacacagccctgttcaatatgcagttcaacaaaggctttaatatcctgacgcggagttagtggggcgttcggaagagtaaatccgcaagccttcatcgcatcgacaaaactatttcctttggcatcacagatattccgcacgtcgtcaggattcgccagcccaaaaatatttttactgccccagaagacatacgggaagcggctgccttcttcttctgccatcgccaccacttcgaccgtacgtagcggcgcgccgtattgcgttttcagccagtcaattgccagccacgccgccagcgcgccgaattgcccgtcaaggttaccgccgttaaccacggtatcgatatgcgaaccgctcagaaccacttcctgtggatattcggtgccattcaggcgaccgtataaattccccacttcatcgaaacgtgtttccagcccgcttgctgccattctttttttaaattgctgctgggtttccagccattccggcgaataaagtaaacgggtcatcccacccgctgggtcagcgccaaaagaggaaagccagggcagcgtttcttctatagcttgacggaaatgtgtaatcataagaaagtcctgtctcaataattattgcgcaaagggatttttcgtttcgtatgacgtgttataaagcgcgtcggaaattaaatactggtaaatatcatcaacaatttcgatgccttcgacggcggctttgcgttgtttaatatcctgatcctgtccgggataataaacctgattaaaaccgggcgcgggggtaatggcatttaattcgcgcatggtctggctaagatgttgacggaataattcgctggaggagaaaaagttcggattaataactatatgtaattgccccaaattacgccctgcgtgtaaatcgtcatacatcgaactaacctgtcgcccgaacggtaagccgagtaagacgcctgagaggacgtcaatcatcatcatcaggccatacccttttggcccggcggcggggagcagagcatgtaccgcgaacggatcggttgttggtacaccgtttttatcgaccgcccaggtatccgggatagacatattacgcgagcgggcgtcgagcacttttccccatgcctgtacggtagtcgccatatcaaaggtaaggatctcgtcgccttctcccggcgcggcaaaggccagggggttagtaccgtagtaaatttccgcgccgccaaacggcaccaccattggatcggactggcacatcgaaatgccaatgaatccggcgcgggctgcctgctgcacaaaataagagattgcgccgctgtgacccatccggctgataccgaccaccgcaacgccattttgctgggcggttttgatggcatgttccatacccattttcgccgcgacctgtccggcggcattgtcggcatgtaaaattgccgagcacggcccggtttcctcaagacgaaactccggttcgcggttggtgccgccttttgaaatgcgttccgcgtagtattccacgcgcaccgcgccatgagagtggatccctctggcatcggcgtaaaccaatacttcagccacggttgcagcgtgctcacgttttaacccagcctggcagagtttattctcaattagctggtggagtgtttcccgactgattttcatctgtcttcctttttaacgacggtgtgaagcatgactgcaattaacatacagggaaaatatctggattatgtgatccagacaggcaaaaaaatatagttagaatttatttgataatccgctcacttttaacctgatttttaaaacaacaacgcttattaaaaaataatgagtaatagcctggtggttatttgaattcttttgttaataattcctgtgtgatattcatcaccttatttactcgttgtcatcgataccgtaatcgccacattaacactgctcgtgcaattgccatgggtgcaatttttaaggagttgttatgatccacgcctttattaaaaaagggtgttttcaggattcggtcagtttaatgattatttcacgaaaactcagcgaatcagaaaatgttgatgatgtttccgtaatgatgggtacgcccgccaataaagcgttattagataccacaggtttctggcatgacgattttaataacgccacgccgaacgatatttgcgtggcaattcgtagcgaagcggcggatgcggggatcgcgcaggcgattatgcagcagcttgaagaggcgctaaaacaactggcgcaggggtcaggcagcagccaggcgttgacgcaggtgcgtcgctgggacagtgcctgtcagaaattacccgatgccaatctggcgctgatttcagtggctggcgagtatgcggcggagctggcaaaccaggcgctggatcgcaacctcaacgtgatgatgttctccgataacgtcacgctggaagatgaaatccaacttaaaacccgcgcgcgggaaaaaggcttgctggtgatggggccggactgcggtacgtcgatgattgccggcacaccgctggcttttgctaacgtgatgccggaaggcaatattggcgtcattggcgcttccggtaccgggattcaggagctgtgttcgcagattgcgctggcaggggagggaattactcacgcgattggccttggcgggcgcgacctcagccgtgaagtgggcggcatcagtgcgctaacagcgctggaaatgctcagtgcagacgagaaaagcgaagtgctggcatttgtttcaaaaccacctgccgaagctgtgcgtctgaaaattgttaatgccatgaaagcaaccggcaaaccgacggtggcgctgtttttaggttataccccggcggtggcccgcgacgagaatgtctggtttgcctcctcgctggatgaggccgcacgcctggcttgcctgctttcacgcgtcacggcgcgacgtaacgcaatagcgcctgtcagcagcggatttatttgcggtttgtataccggcggtacgctggctgccgaagcggcgggattacttgccggacaccttggcgtggaagccgacgatacccatcaacatggcatgatgctggacgccgatagccaccagattattgacctcggcgatgatttctacaccgtcgggcgtccccatccgatgatcgacccaaccttacgcaaccagttaattgccgatctcggcgctaaaccgcaagtgcgcgtgttgctgcttgatgtcgtgattggcttcggtgcgaccgccgatcctgccgcctcgctggtgagcgcctggcaaaaagcctgtgccgcgcgtttagataatcaaccactgtatgccattgccacggtgacaggcactgaacgtgacccgcaatgccgctcgcagcaaatcgccacgctggaagatgcggggattgcggtcgtgagttcgctaccggaagccaccttgctggcggcagcgttaattcatccgctctcgcctgccgcacagcaacacacaccgtcattactggaaaacgtcgccgtgattaacatcggattacgcagctttgcgctggagctacaaagcgccagcaaaccggttgtgcattaccaatggtcgccagtcgccggtggcaataaaaaactggctcgtttattagaacgtttgcaataaggggttcccatgtttacatcagtggcgcaagccaatgctgcggttatcgaacaaattcgtcgcgctcgtccacactggctggatgtgcaaccggcttcttcacttatcagcgaactaaacgagggcaaaacactgcttcacgccgggccgccaatgcgctggcaggagatgaccggacccatgaaaggggcgtgcgtgggcgcatgtctgttcgaaggttgggcgaaagatgaagcgcaggcgctggcaatactggagcagggggaagtgaacttcattccttgtcaccatgtgaatgccgtcgggccaatgggcggtattacttctgccagtatgccgatgctggtggttgagaacgtgaccgacggcaaccgggcgtactgcaacctcaacgaaggtatcggcaaagtgatgcgttttggcgcttacggcgaagatgtcctgactcgccatcgctggatgcgcgatgtgttaatgccagtattaagcgcggcgctggggcgcatggagcgcggtatcgatctcacggcgatgatggcgcagggcattacgatgggcgatgagttccatcaacgcaatattgcttcctctgcactgttaatgcgtgcgctggccccacaaattgctcgcctcgatcatgataaacagcacatcgccgaagtgatggatttcctcagcgtgaccgatcagttcttcctcaacctcgcgatggcttactgcaaggcggcgatggatgctggcgcgatgatccgcgcaggcagcatcgtcacggcaatgacccgcaacggcaatatgttcgggattcgggtaagcgggctgggcgaacgctggtttactgcgcctgtaaacactccgcaaggtctgtttttcaccggcttctcgcaggagcaggcgaacccggatatgggcgatagcgcgattaccgaaacctttggtatcggaggtgcggcaatgatcgcagcgcctggcgtaacgcgctttgtcggtgcgggtggcatggaagcggcaagagcggtatctgaagagatggcggaaatttaccttgaacgcaatatgcagttgcagatcccaagctgggattttcagggcgcgtgcctggggctggacattcgtcgcgtggtagaaaccggcattacgccactcatcaataccggtatcgcccataaagaggcggggatcgggcagattggcgcaggcaccgtgcgggcaccgctggcgtgctttgaacaggcgctggaagcactggctgaaagcatgggtattggttgaggaacgcgcaatgacgatcatccatcctctgcttgccagtagtagcgcaccgaattatcgccagtcctggcggttagcgggagtgtggcggcgggcgattaacctgatgacggaaagcggcgaactgttaacgttgcatcgtcagggtagtggtttcggccccggaggatgggtgcttcgccgtgcgcaattcgatgcgttatgcggtggattatgcggcaatgaacgaccacaggttgtggctcaagggattcgcctcgggcgtttcacggttaaacagccacagcgttattgtttgctgcgtattacgccgcctgcgcatcctcaaccacttgcagctgcatggatgcaacgcgcggaggaaaccgggcttttcgggccactggcgttggcggcaagcgatccgctgcctgctgagttacgccagtttcgtcactgttttcaggccgcgctcaatggcgttaagaccgactggcggcactggctgggtaaaggccccggattaacgccgagtcatgatgacacgctgagcggaatgctgctggcggcctggtattatggcgctttagatgcgcgctccggtcgtccgttttttgcctgttccgacaatctgcaactcgttaccacagcggtgagcgtcagttatttacgttatgccgcgcaaggatatttcgcctcgccactcctgcactttgttcatgctctgagttgcccgaaacgtaccgctgttgcgattgattcgctgctggcgctggggcatacgtcaggggcagatacgctgctggggttctggcttggccaacaattattacaaggaaaaccatgaaaacactggttgtggctcttgggggcaacgccttactccagcgcggtgaggcgctgacggcagaaaatcaatatcgcaatatcgccagtgctgtacccgcgctggcacgcctggcccgttcttatcggttggcgattgttcacggcaacgggccgcaggtggggctgctggcattgcagaatctggcgtggaaagaggtagaaccgtatccgctggatgtgctggttgcggaaagccaggggatgattggctatatgctggcgcagagtttgagcgcacagccgcagatgccgcccgtgacgacggtgctgacgcgcattgaggtttcgcctgatgatccggcgtttttgcagccagagaaatttattggtccggtttatcagccagaagaacaagaggcactggaagcggcttacggctggcagatgaaacgtgatggtaaatatttgcgccgggtggtggcgtctccgcaaccgcgtaaaattctcgacagcgaagccatcgagttgttgctcaaagaggggcatgtggtgatttgcagtggcggcggcggtgtgcctgtgacggatgacggagcagggagtgaagcagtgattgataaagatctcgccgctgcgttgctcgccgagcagattaatgcagatggactggtgatcctcaccgatgctgatgcggtatatgaaaactggggaacgccgcagcaacgtgccattcgccatgccacaccggatgagttagcgccatttgccaaagccgatggttcgatggggccgaatgtaacggcggtgagtggttatgtcagaagccgtggtaaacccgcgtggattggggcgttatcgcgaattgaagagacgctggcgggcgaagcggggacctgtatttcgctgtagtcgtaggcattagacatttgtgcctgatgcgacgcttgacgcgtcttatcaggcctacaaccggtgccgcatccggcaattggtgcacaatgcctgatgcgatgcttgacgcatcttatcaggcctacaatgggtaccggatcggtaggccggataaggcgtttacgccgcatccggcaagaatagagcaccagttaaccgaacttactctgcgcccaaatcacgccgctggcatattccggcggcagcagcgggattaaggcttccagcgtcgcagtcagacgcgatgtgtcgctgtcggtcaaattcagatgccccactttacgccccggacggacttctttgtcgtaccagtgcagatgcaccagcggcagtttcagccagtcataattcacatcgctaccaatcagattgatcatcaccgacggattattcaccactggttgcggtaacggcagatcggtaatcgcccgcagatgcagctcaaactggctgatgctggcaccgttttgtgtccagtgaccgctgttatgcacacgcggtgccagttcgttgatcaacagaccttgcggggtgacaaaacactccatcgccatcacgcccacatagcccagctcctgcataatcgccgacagcatctcttcggcttgcgcctgctgctgtgcgttggcctgcggaaaagcgacgctggtgcgcaaaataccgtcctgatgcaggttatgcgtcagcggataaaacacggtgctgccatcaaagccgcgcgcgccaaccagcgacacttcaccagagaagttaatgccctgctcgacaatacattcgccgtaacactctgccggtaactgttcggtttcatttgcgcgtaaacgccattgaccgcgaccgtcataaccaccagtgcgacgcttaacaatcgccagctcacctaaacgatcaaacaccgcaggccactcgctgcgttcggcaagtaactgccacggtgcagtcggcaggtggagcttatcgaaaagctgcttctgagtcagacggtcagcaataatcgggaacacatcgcggttcacaaaggccggatggcgcgccagctcgcgggttaatgcggtttccggccagcgttctatctcagcggtaatcacgctttgttgaaaaggcaccgccgccggttcagcgtccagcccgactggccagacagcaatgcctaacggttcgcctgcctgacgcagcatacggcctaactgcccgttaccgaggacgcaaacctgtttcatgccgcacctcgcgggtccgggttttccagcacttcgtcggtctgggctttgcgccagtcattcagacgctggtgcagttctttatcatgagtcgcaagaatttgtgctgccagtaacgccgcgtttgccgcgccagctttaccaatcgccagcgtacccaccggaatgccgcgcggcatttgtacgatggagtagaggctatcgacaccgctcagtgcggcgctctgtactggcacgcccagcaccggcaccagcgttttggcggcaatcatgcctggcagatgcgctgcgccgcctgcgcccgcaataatcacctgataaccgttctcttcggcgctttcggcgaagctgaacagtttatcgggggtgcggtgagcagaaaccacttcaacgtggtgcgggacattcaggatttcgaagatttcggcggcgaactgcatggtagcccagtcgcttttggaccccatcacgatggcgacacgcgccggattattgcgggaagacatgcgtcttaaaactcctgtggtgcacaactctcggctttagagggcacagagaatagcacgaaaagagagcaaggaaaacggttgcgtggctgtgaaatcagcaaagttgcgggttttttaaaacggaaaatgaatcagctcaacgtcatccgccgtgactttcaccattgaaccttccgtatgccaggcacccagtaccacgcgaaaagcaggttgctgattggcgataagttcatgcaccgccgggcgatgggtatgcccgtggatcagccattgcacctgatgtttttccatcgcactgaccaccgcgttttggttaacgtccatgatcgccagcgatttactgctgttggcttctttgctgttcgcgcgcattcgcgcggcaatgcgtttgcgcacaaacaacggcagggcgaggaatagcgtctgcagccagggtttgtggaccttggcgcgaaaagcctgataacccgcgtcatcggtgcacagcgtgtcgccatgcataatcaacacccggcgaccataaagttcgagcaccttttcttccggcaataacgtcatgccactttcacgggcaaagcgtttgccgagcagaaaatcacggttgccatgaatgaaataacagggaacgccggaatcggacaccgctttgatcgccgccgccatcttgcgatggagtgggttgggatcgtcgtcgccaatccatgcttcaaacagatcgccaagaatatacagcgcgtcggccttgcgggcttcccccgctaaaaaacgcagaaaaccggcggtgatcgccggttcttccacgcagagatgaagatctgcaataaagagtgtcgccacgattactcgctaacggtcacgctttcaatgataacgtcttcttttggcacgtcctggtgcataccgctacgaccggttgcaacacctttgattttgtctaccacgtccatgccgtcaaccacttcagcaaacacgcagtagccccaaccttgcaggctttcgccagagaagttcaggaagtcgttatcaaccacgttgatgaagaactgtgcagttgcagagtgcggagcctgagtacgtgccattgccagcgtaccacgggtatttttcaggccgttgttggcttcgtttttgatcggttctttggtggctttttgtttcatgcccggttcaaaaccgccgccctgaatcataaagccgttgataacacggtggaaaatggtgttgttgtaaaaaccttcgcggcagtagtccaggaagtttttaactgtttcaggtgctttatcgtcaaaagttttgatgacaatatcgccgtgattggtgtggaaagtaaccatttttgcatcctgttccgtttgattggtgcttcaacccagttcgggtcatatatagggtggtgttatagcataaccgcacgatcggatcatcacgcaatgtatgctgattcgcgcgggaaatatgggtattatacgcaactcaattacccacacatgtctaaacggaatcttcgatgctaaaaatcttcaatactctgacacgccaaaaagaggaatttaagcctattcacgccggggaagtcggcatgtacgtgtgtggaatcaccgtttacgatctctgtcatatcggtcacgggcgtacctttgttgcttttgacgtggttgcgcgctatctgcgtttcctcggctataaactgaagtatgtgcgcaacattaccgatatcgacgacaaaatcatcaaacgcgccaatgaaaatggcgaaagctttgtggcgatggtggatcgcatgatcgccgaaatgcacaaagattttgatgctttgaacattctgcgcccggatatggagccgcgcgcgacgcaccatatcgcagaaattattgaactcactgaacaactgatcgccaaaggtcacgcttatgtggcggacaacggcgacgtgatgttcgacgtcccgaccgatccaacttatggcgtgctgtcgcgtcaggatctcgaccagctgcaggcaggcgcgcgcgttgacgtggtcgacgacaaacgcaacccaatggacttcgttctgtggaagatgtcgaaagagggcgaaccgagctggccgtctccgtggggcgcgggtcgtcctggctggcacattgaatgttcggcaatgaactgcaagcagctgggtaaccactttgatatccacggcggcggttcagacctgatgttcccgcaccacgaaaacgaaatcgcgcagtccacctgtgcccatgatggtcagtatgtgaactactggatgcactcggggatggtgatggttgaccgcgagaagatgtccaaatcgctgggtaacttctttaccgtgcgcgatgtgctgaaatactacgacgcggaaaccgtgcgttacttcctgatgtcgggccactatcgcagccagttgaactacagcgaagagaacctgaagcaggcgcgtgcggcgctggagcgtctctacactgcgctgcgcggcacagataaaaccgttgcgcctgccggtggcgaagcgtttgaagcgcgctttattgaagcgatggacgacgatttcaacaccccggaagcctattccgtactgtttgatatggcgcgtgaagtaaaccgtctgaaagcagaagatatggcagcggcgaatgcaatggcatctcacctgcgtaaactttccgctgtattgggcctgctggagcaagaaccggaagcgttcctgcaaagcggcgcgcaggcagacgacagcgaagtggctgagattgaagcgttaattcaacagcgtctggatgcccgtaaagcgaaagactgggcggcggcggatgcggcgcgtgatcgtcttaacgagatggggatcgtgctggaagatggcccgcaagggaccacctggcgtcgtaagtaattgcgctattgccggatgcgagttttcgcatccggttatcgtctgcgccaccacaacattcccatcagtagcatccccggcaaccacacccacatcaattcagaaataatcacctgatgcccgtacggcgtggtgtaacgagacaatgcaaacggcgcgacttttatcacctgccagggagcgaaaaagcgttcatctgaccacggccacagccagccaacgcctttaccgccagtggttaccgaatccagcaagctgtgcgatagcaacgagacggttaaaaacagccagcagcgaatcagcccagccctgaaccatcggcgtccaataaacacacataacagcgggacaacaaacgcaaacaccagcgaatgggtaaacccgcgatgaccaaaaacattgccgtaagcaacgccaaatttaaacgacaatacgtcggcgtcgggcagcatcgccaggatgattccggcaaataacagacgcggagggatgactttcgaacccaaccctaaaccaatgcataggggaacggcggcgtgcgtaataacggttggcatgatggtcgcttcggcaaaatgtcgatgctatcagcatggatgaacggggcgtagagggcaaaagtctgaaaagagaaccggcctgttgatacaggccgggaaagggatcaggcaacaacctgtacgctgtgacctgcaaaactcactgtctgaccggcgacgattttgcagcgtttgcgcgtttcaaccgcaccgtcgactttcacctggccttcggcaatcgcgattttcgcctgcgcgccgctttcgctccagccttccagtttcagcaagtcgcacagctcaacgtgcggatgtttacctaaagaaaatgtcgccatgttactcatcctgtggatcatgatattcaacgcacgcctgtagcgtgttttcaatcagcgtggcaaccgtcatcgggccaacgccgccgggaacaggcgtaatgtatgaggcgcgtttagccgcgtcttcaaacacgacgtcgcccacaactttgccattttccagacggttgatgccgacatcaatcacaattgcgccttctttgatccagtcaccgggaataaagcctggcttgccaacggcaacgatcaatagatcggcattttctacgtgatgacgcagatttttagtgaagcggtgagtcactgtagtggtgcaacctgccagcagcagttccatgctcatcgggcggccaacgatattcgatgcgccaatcaccacggcgttgaggccgaaggtatcaatgttgtaacgctcaagcagcgtgacgataccgcgcggggtgcagggacgcagacgcggcgcgcgctggcacagacgaccgacgttgtaaggatggaaaccgtccacgtctttgtccggatgaatacgttccagcactttgacgttatcaatacccgccggtaacggcagttgaaccagaatgccatcgatggtgttgtcggcattcagcgtatcgataagctccagcagctccgcttcgctggtggtttccgggaggtcataagagcgggagacgaacccgacttcttcacaagccttgcgtttgcttgcgacataaatttgcgatgcagggttactacccaccagcacaacggccagtcctggtgcccgcagtccggctgcaatacgcgcctgaactttttgagcaacttcagagcgcacctgctgcgcaatcgttttaccgtcaataatctttgctgccatcagagagaggattccatctgttacgtagatcgaaggggatgcgcctattttgtcagaagcggggcgcgctgtcaggtttcgtttcagatttatcgcgtgaagcgacctcttgcgaaggtgaggcgcaccgtcgctgagactgaaagcttcatttttcgtccatgatggcgttgtaaatctggaactgatttatttccttgtctaaggattaagataatttaagaaatacctgacaatataaaaagaattttcagcctggtaatttaccgcttcaggtctatatttgtgttgaatatattttgcgcggaagtattcatctaacggggctctctattttttagaatagagtgcatattttcaattaagacattcttagaggataaaaaggaatttactactatcagtgtcttaaataaagtaatcggttatatacggatgtggagtcgataaatgagattgaaggaatatatatgaaattaagatttatttcgtctgcgctggctgccgcactattcgccgctacgggtagttatgctgccgttgtagatggcggtacaattcactttgaaggcgaactggtgaatgctgcctgttcagtgaatactgactcggcagaccaggttgtcacactcggtcaatatcgtaccgatattttcaatgctgttggtaatacctctgcattaattccattcaccattcagttgaacgactgcgatcctgttgttgccgctaatgctgccgttgcattttctggtcaggctgatgcaatcaatgataatttattggccattgcatccagtaccaatacaacaacagcaacgggtgtcggtattgaaatacttgataatacatccgcaattctcaaacctgatgggaatagcttctcaaccaaccagaacttgatccccgggaccaacgttcttcatttttctgcacgttataaaggcaccggtacaagtgcatcagcagggcaagcaaatgctgacgcgacttttattatgagatatgaataatcaaaaccacgttgttttgaattatatatcacgtcttataacaaagtaatgtaccggttgtctgaagcggtatggtggcaatgtaaatcgaaatcatgttcactttgtatcatgccgctttattaaatgaaaagggaatgatgtgttgtaagaaaccaaagcaatcatttctttatattccttatttttgccgtcaggaatacacaaggcgtattaactatgatgactaaaataaagttattgatgctcattatattttatttaatcatttcggccagcgcccatgctgccggagggatcgcattaggtgccacgcgtattatttatcccgctgatgctaaacagactgcggtatggattagaaatagccataccaatgagcgctttctggtcaattcgtggattgaaaacagcagcggtgtaaaagaaaagtcattcatcattacaccgccactgtttgttagtgaacccaaaagcgaaaatactttgcgtattatttacaccggtccaccgctggcagcagatcgtgagtctctgttctggatgaatgttaagacgatcccttcggtagataaaaatgcattgaacggcaggaatgttttgcaactggcgattttatcgcgcatgaaattatttctccgtccaattcaattacaagaattacccgcagaagcgccggacacactcaagttttcgcgatccggtaactatatcaatgttcataatccatcacctttttatgtcaccctggttaacttacaagtgggcagccaaaagttggggaatgctatggctgcacccagagttaattcacaaattcccttaccctcaggagtgcagggaaagctgaaatttcagaccgttaatgattatggttcagtaactccggtcagagaagtgaacttaaactaaccgaatcatctgacaatatcagagctaattatgaaaatacccactactacggatattccgcagaggtatacctggtgtctggccggaatttgttattcatctcttgccattttaccctcctttttaagctatgcggaaagttatttcaacccggcatttttattagagaatggcacatccgttgctgatttatcgcgctttgagagaggtaatcatcaacctgcgggcgtgtatcgggtggatctctggcgtaatgatgagttcattggttcgcaggatatcgtatttgaatcgacaacagaaaatacaggtgataaatcaggtgggttaatgccctgttttaaccaggtacttcttgaacgaattggccttaatagcagtgcatttcccgagttagcccagcagcaaaacaataaatgcatcaatttactgaaagctgtacctgatgccacaattaactttgattttgcagcgatgcgcctgaacatcactattcctcagatagcgttgttgagtagcgctcacggttacattccgcctgaagagtgggatgaaggtattcctgctttactcctgaattataatttcaccggtaacagaggtaatggtaacgatagctatttttttagtgagctcagcgggattaatattggcccgtggcgtttacgcaacaatggttcctggaactattttcgcggaaatggatatcattcagaacagtggaataatattggcacctgggtacagcgcgccattattccgctgaaaagtgaactggtaatgggagacggcaatacaggaagtgatattttcgatggcgttggatttcgtggtgtacggctttattcttctgataatatgtatcctgatagccagcaagggtttgccccaacggtacgtgggattgcccgtacggcggcccagctaacgattcggcaaaatggttttattatctatcaaagctatgtttcccccggcgcttttgaaattacagatttgcacccgacatcttcaaatggcgatctggacgtcaccatcgacgagcgcgatggcaatcagcagaattacacaattccgtattcaacagtgccaattttacaacgcgaagggcgtttcaaatttgacctgacggcgggcgattttcgtagcggtaatagtcagcaatcatcgcctttcttttttcagggtacggcactcggcggtttaccacaggaatttactgcctacggcgggacgcaattatctgccaattacaccgcctttttattagggctggggcgcaatctcgggaactggggcgcagtgtcgctggatgtaacgcatgcgcgcagtcagttagccgacgccagtcgtcatgagggggattctattcgcttcctctatgcgaaatcgatgaacaccttcggcaccaattttcagttaatgggttaccgctattcgacacaaggtttttatacccttgatgatgttgcgtatcgtcgaatggaggggtacgaatatgattacgacggtgagcatcgcgatgaaccgataatcgtgaattaccacaatttacgctttagccgtaaagaccgtttgcagttaaatgtttcacaatcacttaatgactttggctcgctttatatttctggtacccatcaaaaatactggaatacttcggattcagatacgtggtatcaggtggggtataccagcagctgggttggcatcagttattcgctctcattttcgtggaatgaatctgtagggatccccgataacgaacgtattgtcggacttaatgtttcagtgcctttcaatgttttgaccaaacgtcgctacacccgggaaaatgcgctcgaccgcgcttatgcctcctttaacgccaaccgtaacagcaacgggcaaaatagctggctggcaggtgtaggtgggaccttactggaaggccacaacctgagttatcacgtaagccagggtgatacctcgaataatgggtacacgggcagcgccacggcaaactggcaggccgcttacggtacgctggggggcgggtataactacgaccgcgatcaacatgacgttaactggcagctgtctggcggtgtggtcgggcatgaaaatggcataacgctgagccagcctttaggggataccaatgttttgattaaagcgcctggcgcaggcggtgtacgcattgaaaatcaaactggcattttaaccgactggcgcggctatgcggtgatgctgtatgccacggtttatcggtataaccgtatcgcgcttgataccaatacgatggggaattccatcgatgttgaaaaaaatattagcagcgttgtgccgacgcaaggcgcgttggttcgtgccaattttgatacccgcataggcgtgcgggcgctcattaccgttacccagggcggaaaaccggtgccgtttggatcactggtacgggaaaacagtaccggaataaccagtatggtgggtgatgacgggcaagtttatttaagtggtgcgccattgtctggtgaattactggttcagtggggagacggcgcgaactcacgctgcattgcgcactatgtattgccgaagcaaagcttacagcaagccgtcactgttatttcggcagtttgcacacatcctggctcataaaggaaattatcaataagataatctgcagattattattggcgatggcatgtttgtgtctggcaaacatatcctgggctactgtttgtgcaaatagtactggcgtagcagaagatgaacactatgatctctcaaatatctttaatagcaccaataaccagccagggcagattgttgttttaccggaaaaatccggctgggtaggtgtctcagcaatttgtccacccggtacgctggtgaattatacataccgtagttatgtcaccaactttattgttcaggaaactatcgataattataaatatatgcaattacatgattatctattaggtgcgatgagtctggttgatagtgtgatggatattcagttccccccgcaaaattatattcggatgggaacagatcctaacgtttcgcaaaaccttccattcggggtgatggattctcgtttaatatttcgtttaaaggttattcgtccctttattaacatggtggagatccccagacaggtgatgtttaccgtgtatgtgacatcaacgccttacgatccgttggttacacctgtttataccattagttttggtggccgggttgaagtaccgcaaaactgcgaattaaatgccgggcagattgttgaatttgattttggtgatatcggcgcatcgttatttagtgcggcagggccgggtaatcgacctgctggtgtcatgccgcaaaccaagagcattgcggtcaaatgtacgaatgttgctgcgcaggcttatttaacaatgcgtctggaagccagtgccgtttctggtcaggcgatggtgtcggacaatcaggatttaggttttattgtcgccgatcagaacgatacgccgatcacgcctaacgatctcaatagcgttattcctttccgtctggatgcagctgcggcagccaatgtcacacttcgcgcctggcctatcagtattaccggtcaaaaaccgaccgaagggccgtttagcgcgctggggtatttacgcgtcgattatcaatgaggtacggagaatgagaagagtactctttagctgtttctgcgggctactgtggagttccagtggatgggcagttgaccctttaggaacgattaatatcaatttgcacggtaacgttgttgatttctcctgtaccgtaaacacagcggatattgataagacggtagatttaggcagatggcctacgacacaactactgaacgctggcgataccacggcactcgtcccttttagcctgcggctggagggatgtcctccgggttcagttgcgattttatttacgggaacgccggcatccgataccaacctgctggctctggatgatcccgcaatggcacaaaccgtcgccatcgaattacgtaatagcgatcgctcccggctcgcactgggggaggcgagcccgactgaggaagtagatgcaaatggcaatgtcacactaaacttttttgccaattatcgagcgttagccagcggtgttcggccaggtgtggcgaaagcggatgcgatatttatgatcaattataattaatattatattaattcgtataatttggcgtagtcgataagctctacaattgaatgcaaacctagcttgccataaatattagatttatgcgcactaactgttttattgctaagtaataacttatcggcaatttctttattagataatccgctaaccagataacgtaatatggtcacttcacgattagatagcacagtgaccgttgaactattcgtactacatttattgctttttatatagttaagcgtttcgctgggaaaaaacgtgtatccggagaggatcatctgaacggcatgaaaaatatcattctgatcattgcatttactgacaaaaccgttagcaccagcttgtatcgctctgccagcataaaagcattctgatttcgatgataaaaataacactttcactgtgctctggatttgtttgatccttttcaggaaggtaaaaccgtctgttccgggcaagtctatatccataatgattaaatcaacaggacgggttcggagataatcgatggttatgcgataatcatccgttttcaggacaatctgcaattcactgtttttttgcaacagaacttcaatagacattctgatgataggatgagtatccataatgatcaccgacgttggtttcatagttaccagtctcataggagcggacaattttccgttaggtcgggaaattgtactttgatacatgaaaatacgggttttcttgattcagacgcgcagcggtgtgcgtttgtttgccgctatagcgaaataaatcagaaaatcagacgcggtcgttcacttgttcagcaaccagatcaaaagccattgactcagcaagggttgaccgtataattcacgcgattacaccgcattgcggtatcaacgcgcccttagctcagttggatagagcaacgaccttctaagtcgtgggccgcaggttcgaatcctgcagggcgcgccattacaattcaatcagttacgccttctttatatcctccataatttcagagtgggacatatttgggacattatcaccaaaaatgtcgtctattttcctcgcatgctctgtcaaatgattaggcgcaaggtgagcatacctacgaaccatttctatggactcccatccgcccatttcctgaagcactgataatgggacgcctgactgaatcagccagcttgcccaggtgtgtctgaggtcatggaaacggaaatcttcaattcctgcacgacgacaagctgatagccatgatgtcttgctgtcgatgcgcatcttcctgaccgcaggcgttgatgttccatctgctcgcttagccgccttggtatgtacaaacacccatttgtgatgcttgcctatttgatcacgcaacactttacaggcggtatcgttcagcgccacaccaatggcgcggtttgatttgctctcttctggattcacccaggcaactcgtcgctgcatgtcgatttgttgccattccagatttatgatgttcgactttctcagaccagttgccagcgcaaacttgacgacagatttcagtggttcggggcactcatcaataaggcgttttgcttcctccttttccagccatctgactcgcttgtttctgaccgctggtatcttgatgacaggcgctttttccagccacttccagtcgcgttctgcagcacggagaatggcctttatcatggcaagatgctttgcctttgtctgagttgatactggctttggttcataaacaggcagttctttacctttcctgatggcggcctgaactttctgtttccatatttctttcgtctttctgttatgcattctgcttacagcagagtaaatctttgcctccgagatatctttaagccttataccctcaaaatgttcaagccagaactcaatccggcttttatctgaatcgagagattttttatcagctttttcctcaagccatcttaggcaggcctcttcaaaagtgacatcaggtaaatcccctagcttttctactcgccagagttctgcttttcgcttgtcgtgcaactcctgagcttgccgtttgtcctttgtgccaagagattccttaattcgtttcccgcccgggagcgaatacgaggcataccatatttcatttctgcggaagagtgacattttctttcctctgttatgccatcacccgcgctcacctggacagtatgcagcggagactgaagcgccgcaatgcaggcttgccgtgttgtgaggtacccggatattatcgtgaggatgcgtcatcgccattgctccccaaatacaaaaccaatttcagccagtgcctcgtccattttttcgatgaactccggcaccatctcgtcaaaactcgccatgtacttttcattccgctcaatcacgacataatgcaggccttcacgcttcatgcgcgggtcatagttggcaaagtaccaggcatcttttcgcgtcacccacatgctgtactgcacctgggccatgtaagccgattttattgcctcgaaaccaccgagccggaatttcatgaaatcccgggaggtacgagtattgccggaagcgtggcctgtatccggatgcagagtcttatccgtggaaatcgaacgcgcattactggttggttaccaacttgtaccagaacatgcgggccaatgcgctggctgacgcggaattacggcgcaaggctgccgatgaactgacctgtatgacagcgcgaattaaccgtggtgagacgatacctgaaccagtaaaacaacttcctgttatgggcggtagacctctaaatcgtgcacaggctctggcgaagatcgcagaaattaaagctaagttcggactgaaaggagcaagtgtatgacgggcaaagaggcaattattcattacctggggacgcataagagcttctgtgcacaggacgttgccgcggtaacaggcgcaaccgtaatctgatcttacccagcaatagtggacacgcggctaagtgagtaaactctcagtcagaggtgactcacatgacaaaaacagtatcaaccagtaaaaaaccccgtaaacagcattcgcctgaatttcgcagtgaagccctgaagcttgctgaacgcatcggtgttactgccgcagcccgtgaactcagcctgtatgaatcacaactctacaactggcgcagtaaacagcaaaatcagcagacgtcttctgaacgtgaactggagatgtctaccgagattgcacgtctcaaacgccagctggcagaacgggatgaagagctggctatcctccaaaaggccgcgacatacttcgcgaagcgcctgaaatgaagtatgtctttattgaaaaacatcaggctgagttcagcatcaaagcaatgtgccgcgtgctccgggtggcccgcagcggctggtatacgtggtgtcagcggcggacaaggataagcacgcgtcagcagttccgccaacactgcgacagcgttgtcctcgcggcttttacccggtcaaaacagcgttacggtgccccacgcctgacggatgaactgcgtgctcagggttacccctttaacgtaaaaaccgtggcggcaagcctgcgccgtcagggactgagggcaaaggcctcccggaagttcagcccggtcagctaccgcgcacacggcctgcctgtgtcagaaaatctgttggagcaggatttttacgccagtggcccgaaccagaagtgggcaggagacatcacgtacttacgtacagatgaaggctggctgtatctggcagtggtcattgacctgtggtcacgtgccgttattggctggtcaatgtcgccacgcatgacggcgcaactggcctgcgatgccctgcagatggcgctgtggcggcgtaagaggccccggaacgttatcgttcacacggaccgtggaggccagtactgttcagcagattatcaggcgcaactgaagcggcataatctgcgtggaagtatgagcgcaaaaggttgctgctacgataatgcctgcgtggaaagcttctttcattcgctgaaagtggaatgtatccatggagaacactttatcagccgggaaataatgcgggcaacggtgtttaattatatcgaatgtgattacaatcggtggcggcggcacagttggtgtggcggcctcagtccggaacaatttgaaaacaagaacctcgcttaggcctgtgtccatattacgtgggtaggatcaaccagcataaatcaggctgcggctaaaatggcgcgggcaggaatcctggtcgttgatggtaaggtctggcgaacggtgtattaccggttcgctaccagagaagaatgggaaggaaaggtgagcacgaatctgatttttaaggagtgtcgccagagtgccgcgatgaaacgggtattgagggtatataaaagaacatcaatgggaacacaatgatgaaacaggtgagttgagttcaaactgtagtacaattctctccagtttgaacaggaaagaatatgctatgaacccttatatttatcttggtggtgcaatacttgcagaggtcattggtacaaccttaatgaagttttcagaaggttttacacggttatggccatctgttggtacaattatttgttattgtgcatcattctggttattagctcagacgctggcttatattcctacagggattgcttatgctatctggtcaggagtcggtattgtcctgattagcttactgtcatggggatttttcggccaacggctggacctgccagccattataggcatgatgttgatttgtgccggtgtgttgattattaatttattgtcacgaagcacaccacattaaaataatttgtttctaaacgactaaaatatggaggctcttatatttatatgagcctcgttttatgctttttgttaatgtctttattttttatgtattcttttgtgctttcaagattatggcgtaagaaaattgcaatacgattattgttgtatattcaagataatgtgaccttaattgtctttttaaataaaaaataaacaaaaattatatcccaccactaaggtttataaaagcatacgttagcaggtgtcaccatgaaaaaagccatagcatatatgcgattttcatcaccaggtcagatgtctggcgactcattaaaccgacagagaagacttattgctgaatggttaaaggtaaatagtgattattatcttgataccataacatatgaagatttaggattaagtgcattcaaaggaaagcatgcacaatcaggagctttttcggaatttttagatgctatagagcatggttatatattgccaggaactacattgttagttgaaagtctggacagactttcaagagaaaaagtcggtgaagcgattgaacgtctgaaattgattttgaatcacggtattgatgttataactctttgcgacaatacagtctataatattgactctttgaatgagccatattcattaataaaagccatacttatagcacaaagggcaaatgaagaaagcgagataaagtcaagtcgggttaaattatcatggaagaaaaaacggcaggatgcactggaatcaggtacgattatgacggcgtcttgtccgagatggctctccttagatgacaaaagaacggcttttgttccagaccccgacagggtgaaaactattgagctaatttttaaactcaggatggaaaggcgctcattgaatgcaatagccaagtatttaaatgatcatgctgtaaagaatttctcaggaaaagaaagtgcatggggaccttctgtaattgaaaaattattagcgaataaagctctgataggtatttgcgtaccttcatatcgtgcaagagggaaagggataagtgaaatcgctggctattatcccagagtcatatcagatgatttgttttacgctgtacaggaaattcggttggcaccttttggtattagcaatagtagcaagaatcctatgctaataaatctacttcgaacagttatgaagtgtgaggcttgtggtaataccatgattgttcatgcggtatctggaagtttgcatggctattatgtttgtccgatgagaagattacatcgatgtgacaggccatcaataaaaagagatttggttgattataatatcattaatgaattgctttttaattgtagcaaaattcaaccagttgaaaacaagaaagatgctaatgaaactttagagttaaaaattattgagcttcagatgaaaattaataatttaatcgttgcattgtctgtcgcgcctgaagttaccgctatagcagagaaaataagactattagataaggaattacgaagggcttcggtatcattgaaaactttgaagagtaaaggtgtaaattcattcagtgatttttatgctattgacttaaccagtaaaaatggacgagagttatgccgtacacttgcctataaaacattcgaaaaaatcataattaatacggataataaaacctgtgatatctattttatgaatggcattgtttttaaacactatcctttaatgaaagtaatatccgcccagcaggcgataagtgctctcaaatatatggttgatggtgagatttatttctaaataatgatctcggattttaagttatgctatggtgataaagtgcaagacagaattaattatctttgacgaaacttaatgggtaattactttgtttgctcccacaagcgagttttgtacggctgtattggggtagtaaatgagctatacaatcttaatcatttgttaggtgagaactcttggtcgcagattcaaatactgaaaatacgtgacaaattattatgagcaaaatggtgtatgtcacgtattttgaatggtaggttaaaaaataacaccgactttcgtaggtgttactaataataaagcagagtttttagatagtatcaatgtgctttgtgtatattgtggcaaataattgggttgggggtacaattgtgattgcttttgcatgaacattgcgcctttatgcataatgagataaaggaatatcaaataaaataacgataggtcataacaaagaggtttttatgaaaacacttatcgtttcaactgtattggcattcataacattttctgcgcaggctgcagcatttcaggtcactagtaatgaaataaaaacaggagagcaacttacaacgtctcatgtcttttctggatttgggtgtgaaggtggtaatacatcgccctcattaacctggtctggtgttcctgaaggtaccaaaagctttgccgtaactgtatatgatccagatgcacctacaggcagtggttggtggcattggactgttgttaatattccagcaacagtaacatatttgcccgttgatgcagggagacgtgatggaacaaaactgccgactggtgctgttcaaggccgaaatgattttggctatgctgggtttggtggcgcatgtcctcctaaaggagataaaccacatcattaccagtttaaagtatgggctctaaaaactgaaaagattcctgtagattctaactccagcggagcgttagttggttatatgcttaatgctaataaaatcgcaaccgctgagataacaccagtttatgagataaagtagggtgagagtatgctggcaagaggtaagactaacttaaagatcgaagaaatacggatgcataaacatcatgagattcatagggttaagcctcttatgccagctttgtgtcgtatccgtcagggaaagaaagttatcaattgggagacgcatactttaactgttgataataatcaaataatattatttccttgtggttatgaattttatattgagaattatcctgaagcagggctttatcttgcagaaatgctttacttacccattgatttaattgagagtttccaaaaactttatacggtaactgatcaaatacgtaacaaaacaagtttctttttacctcagaatcctgagttaatatattgttgggagcaactaaaaacatctgtttcccgaggcttctcaactaaaattcaggagcacttagcaatgggcgttctactttcgttaggagtgaatcatgttaatcatttacttttatcatatagtaaacaatcattgataagtcgttgttataacctgctgctatccgaacccggcacaaaatggacagcaaacaaggttgctcgatatctctacatttctgtttctacattacatcgccgtctagcaagcgagggggtaagtttccaaagtatactggacgatgtgaggttaaataatgcgttgtctgctatacaaacgacggtaaaacctataagcgagattgccagagaaaatggttataagtgtccttctcgttttactgaaagatttcataatcgttttaatataacaccaagagagataagaaaagcttccagagagtaaaagtgttttaagaaggagcaattctatcgattttgattttgggaaatcaacacggcataattatgtcaccggagcctgaacaactccggtgacttctgcgctaaacggggacgtttatgcgcacatacaatccaaactctcttctcccttcacagatgcagaaatgcacctgcaattctttgcatctagcgtttgacctctgcggaggggaagcgtgaacctctcacaagacggcatcaaattacatcgcggcaacttcaccgctatcggtcggcagatccagccttatctggaggagggcaaatgctttcgcatggtgcttaaaccgtggcgtgagaaacgcagtctttcccagaatgcactcagccacatgtggtacagcgaaatcagtgaatacctcatcagcaggggtaaaacgttcgccactccagcttgggtaaaagatgctctcaaacacacatatctcggttatgaaaccaaagacctggttgatgtcgtaaccggtgatatcaccactatccagtcgttacgccatacctccgatcttgataccggagagatgtatgtcttcctgtgtaaggttgaagcctgggcgatgaatattggttgccacctgactattccacagagctgcgagttccagctgctgcgcgacaagcaggaggcgtaatggctacaccgcttattcgtgtcatgaacggacacatctacagagtaccaaatcgtcgtaagcgtaaacctgagctgaagccatccgaaataccaacactgctcggatataccgccagcttggttgataaaaaatggttgcgactggcagcaaggaggagtcatggctgatttgagaaaagcagcgcgtggtcgggaatgccaggtaagaatccctggcgtatgtaatggcaaccctgaaacgtctgtactggcacatatccggctgactggattgtgcggcaccggtacgaaaccgccagacctgattgccaccattgcatgttctgcctgccacgacgaaatcgaccgccgcacgcattttgttgacgctggatatgcaaaagaatgcgcgctggaaggtatggcgagaacacaggttatctggctgaaagagggggttattaaggcgtgaatacctacagcatcacattaccctggcctccgagcaataatcgctattaccgccataatcgcgggcgcacgcacgtcagcgcagaggggcaggcataccgcgataacgtcgcccgaatcattaaaaacgcaatgctggatatcggcctggctatgcctgtgaaaatccgcattgagtgccacatgccggatcgccgtcgccgtgacctggataatctgcaaaaagccgcttttgacgcactcactaaagcaggtttctggctggatgatgctcaggtcgttgattaccgcgttgtgaagatgcctgttaccaaaggtgggaggctggaactgaccatcaccgaaatggggaatgaatgatgtttgagtttaatatggcagaacttcttcgccaccgctgggggcgtctgcgcttatatcgtttccccggttctgttttgaccgattaccgaatactgaagaattacgccaaaaccctgacaggagcaggagtatgaagtcagagataacaatcaactaatactgttttgttgatttttgcttgtaattggcgttctggtctgatttttgtggagtaagttgatgcgtgatattcagatggttcttgagcgttggggagcgtgggcggctaataatcatgaagatgtgacctggtcgtccattgccgccggttttaagggattaattacttcaaaagtaaaatctcgcccgcaatgttgtgacgatgacgcgatgatcatttgcgggtgcatggcccgtctgaaaaagaacaacagcgatttgcacgatttattagtagattattatgtagtcggtatgacattcatgtcactggcaggtaagcattgctgctctgatggttatatcgggaaaaggttacagaaggctgagggcataattgaagggatgttaatggcattagatatccggttagagatggatatcgttgttaataactctaattaatatgccaattgtttactaaaaattattaaaaatggggcgttgagacgcccccaaaaataaagggtaatatataacagaaggtttatatagttagaagcaaggttgtgcttctaaaggaagtggcttgagggagccacttatatgttggggaggcaacgcctcccgcaacatatctttttcgtaatcagattagaactggtaaaccagacctacagcaacgatgtcatcagtgcttacaccgagtgctttagggaaggtgcgaataagcggggaaattcttctcggctgactcagtcatttcatttcttcatgtttgagccgattttttctcccgtaaatgccttgaatcagcctatttagaccgtttcttcgccatttaaggcgttatccccagtttttagtgagatctctcccactgacgtatcatttggtccgcccgaaacaggttggccagcgtgaataacatcgccagttggttatcgtttttcagcaaccccttgtatctggctttcacgaagccgaactgtcgcttgatgatgcgaaatgggtgctccaccctggcccggatgctggctttcatgtattcgatgttgatggccgttttgttcttgcgtggatgctgtttcaaggttcttaccttgccggggcgctcggcgatcagccagtccacatccacctcggccagctcctcgcgctgtggcgccccttggtagccggcatcggctgagacaaattgctcctctccatgcagcagattacccagctgattgaggtcatgctcgttggccgcggtggtgaccaggctgtgggtcaggccactcttggcatcgacaccaatgtgggccttcatgccaaagtgccactgattgcctttcttggtctgatgcatctccggatcgcgttgctgctctttgttcttggtcgagctgggtgcctcaatgatggtggcatcgaccaaggtgccttgagtcatcatgacgcctgcttcggccagccagcgattgatggtcttgaacaattggcgggccagttgatgctgctccagcaggtggcggaaattcatgatggtggtgcggtccggcaaggcgctatccagggataaccgggcaaacagacgcatggaggcgatttcgtacagagcatcttccatcgcgccatcgctcaggttgtaccaatgctgcatgcagtgaatgcgtagcatggtttccagcggataaggtcgccggccattaccagccttggggtaaaacggctcgatgacttccaccatgttttgccatggcagaatctgctccatgcgggacaagaaaatctcttttctggtctgacggcgcttactgctgaattcactgtcggcgaaggtaagttgatgactcatgatgaaccctgttctatggctccagatgacaaacatgatctcatatcagggacttgttcgcaccttccttagtgaagtcatttttgtcaagcaggttgattttgtaatcaacgaaagtagacatatttttgttgaagtaataggttgcacctacatcaacatatttgactaagtcctgatcgccccatactccaagatccttacctttagattgcaggtaagcaacggacggacgcagaccgaaatcgaactgatattgtgcaacagcttcgaagttttgggctttattagcaacgaagtgatcagcaaatacagtcatattctgggtttcagaataggtagtggccaggtaaatgttgttagcgtcatatttcagacctgcggcccaaacttctgcatttttaccggaagcaaatacttcaggaagaactttccctgcattaacttgagtgtcggtacgatcagatttcgcataagttgcaccgataccgaatccttcgtattcataggtagcagagaaaccgaagccatcaccgttaccttcagtgtagttatcgaaatcgctacgatcgtttttgccttggtactgagcagcaaagttcagaccatcaaccagaccaaagaagtcgttgttacgataggttgcaacaccagttgcacgttgagtcatgaacacgtcggtttgagtccaagtgtcaccaccgaattctggcaggacgtcagtccacgcaccgatgtcgtatgctacaccgtagttacggccgtaatcgatggagccgtagtcaccgaatttcaggccagcgaaggcaagacgggttttatctttggaggaaccttgagattcagcgcggttgcctttgaattcatattcccactgaccgaaaccagtcagttgatcgttgatttgggtttcacctttgaagccaagacgggcataagtagtatcaccatcatctgcatcattagaggagaagtagtgcttagcattaactttcccgtacagatccagcttgttactgtctttattataaatttcagctgcctgagcagacatcgccattagtactgatgcagctacagcagaaattgccactgttaattttttcatcgtgagccctttttttgaactattattaaaaaatgatgtcactgcgcgataaatattcatctaatcaatgtgattatttcaagatgtaagttttggtttctcgtttgatttgtgaagtagatctctatttttatctgaacttttttctatcgaatcctattcatggctcttggctgaataaaaataaatctattagccaatttatattaacggctgttatttataagtgctctataatttgaaggttcaatttaaaccggctaaaaataacactggaaattattttttggttatttgttgagatttgcttatgtatttgtagtggtgttttcaatactcggtagcattctctcaaatatcatttagtggtttacgtacgtaaaaaattggttatgctgttaagagtggttacttcgtcacacagcttaaacccgccgtcgagcgggtttttccattttttgagtctcgatattagctgataacccaatacctgagttattcactgactccgagtctgttacgtttcgtagtattccctcaatttacacccgctttgtctgcgaggtggggttatgaaatccatggataagttaacaacgggtgtcgcctatggcacctcagcaggtagtgccgggtactggtttttacagctgctagataaagtcactccctcacagtgggcagcaataggtgtgctgggtagcctggtatttggcctgctgacgtacctgacaaacctttatttcaagattaaagaagataagcgcaaggctgcgagaggtgaataatgcctccatcattacgaaaagccgttgctgctgctattggtggcggagcaattgctatagcatcagtgttaatcactggcccaagtggtaacgatggtctggaaggtgtcagctacataccatacaaagatattgttggtgtatggactgtatgtcacggacacaccggaaaagacatcatgctcggtaaaacgtataccaaagcagaatgcaaagcactcttgaataaagaccttgccactgtcgccagacaaattaacccgtatatcaaagtcgatataccggaaacaacgcgcggcgctctttactcattcgtttacaacgtgggtgctggcaattttagaacatcgacgcttcttcgcaaaataaaccagggcgatatcaaaggcgcatgtgatcagctgcgtcgctggacatacgctggcggtaagcaatggaaaggcctgatgactcgtcgtgagattgagcgtgaagtctgtttgtgggggcaacagtgagcagagtaaccgcgattatatccgctctgattatctgcatcatcgtcagcctgtcatgggcggtcaatcattaccgtgataacgcaatcgcctacaaagtccagcgcgacaaaaatgccagagaactgaagctagcgaacgcggcaattactgacatgcagatgcgtcagcgtgatgttgctgcgctcgatgcaaaatacacgaaggagttagctgatgcgaaagctgaaaatgatgctctgcgtgatgatgttgccgctggtcgtcgtcggttgcacatcaaagcagtctgtcagtcagtgcgtgaagccaccacggcctccggcgtggataatgcagcctccccccgactggcagacaccgctgaacgggattatttcaccctcagagagaggctgatcactatgcaaaaacaactggaaggaacccagaagtatattaatgagcagtgcagatagagctgaccatatcgatgggcaactcatgcaattattttgagcaatacacacgcgcttccagcggagtataaatgcctaaagtaataaaaccgagcaatccatttacgaatgtttgctgggtttctgttttaacaacattttctgcgccgccacaaattttagctgcatcgacagttttcttctgcccaattccagaaacgaagaaatgatgggtgatggtttcctttggtgctactgctgtctgtttgttttgaacagtaaatgtctgttgagcacatcctgtaataagcagggccagcgcagtagcgagtagcatttttttcatggtgttattcccgatgctttttgaagttcgcagaatcgtatgtgtagaaaattaaacaaaccctaaacaatgagttgaaatttcatattgttaatatttattaatgtatgccaggtgcgatgaatcgtcattgtattcccggattaactatgtccacagccctgacggggaacttctctgcgggagtgtccgggaataattaaaaacgatgcacacagggtttagcgcgtacatgtattgtattatgccaacaccccggtgctgacacggaagaaaccggacgttatgatttagcgtggaaagatttgtgtagtgttctgaatgctctcagtaaatagtaatgaattatcaaaggtatagtaatatcttttatgttcgtggatatttgtaatccatcggaaaactcctgctttagcaagattttccctgtattgctgaaatgtgatttctcttgatttcaacctatcataggacgtttctataagatgcgtatttcttgagaatttaacatttacaacctttttaagtccttttattaacacggtgttatcgttttctaacacaatgtgaatattatctgtggctagatagtaaatataatgtgagacattgtgacgttttagttcagaataaaacaattcacagtttaaatcttttcgcacttgatcgaatatttctttaaaaatggcaacctgagccattggtaaaaccttccatgtgatacgagggcgcgtagtttgcattatcgtttttatcgcttcaatctggtctgacctctttgtgttttgttgatgatttatgtcaaatattaggaatgttttcaattaatagtattggttgcgtaacaaagtgcggtcctgctggcattctggagggaaatacaaccgacagatgtatgtaaggccaacgtgctcaaaccttcatacagaaagatttgaagtaatattttaaccgctagatgaagagcaagcgcatggagcgacaaaatgaataaagaacaatctgctgatgatccctccgtggatctgattcgtgtaaaaaatatgcttaatagcaccatttctatgagttaccctgatgttgtaattgcatgtatagaacataaggtgtctctggaagcattcagggcaattgaggcagcgttggtgaagcacgataataatatgaaggattattccctggtggttgactgatcaccataactgctaatcattcaaactacttaacctgtgacagagccaacacgcagtctgtcactgtcaggaaagtggtaaaactgcaactcaattactgcaatgccctcgtaattaagtgaatttacaatatcgtcctgttcggagggaagaacgcgggatgttcattcttcatcacttttaattgatgtatatgctctcttttctgacgttagcctccgacggcaggcttcaatgacccaggctgagaaattcccggaccctttttgctcaagagcgatgttaatttgttcaatcatttggttaggaaagcggatgttgcgggttgttgttctgcgggttctgttcttagttgacatgaggttgccccgtattcagtgtcgctgatttgtattgtctgaagttgtttttacgttaagttgatgcagatcaattaatacgatacctgcgtcataattgattatttgacgtggtttgatggcgtagatgcacgttgtgacatgtagatgataattattatcattttgtgggtcctttccggcgatccgacaggttacggggcggcgacctcgcgggttttcgctatttatgaaaattttccggtttaaggtgtttccgttcttcttcgtcgtaacttaatgtatttatttaaaataccccctgaaaagaaaggaaacgacaggtgctgaaagcgagctttttggcctctgtcgtttcctttctctgtttttgtccgtggaatgtgcaatggaagtcaacaaaaagcagctggctgacattttcggtgcgagtatccgtaccattcagaactggcaggaacagggaatgcccgttctgcgaggcggtggcaagggtaatgaggtgctttatgactctgccgccgtcataaaatggtatgccgaaagggatgctgaaattgagaacgaaaagctgcgccgggaggttgaagaactgctgcaggccagcgagacagatctccagccagggactattgagtacgaacgccatcgacttacgcgtgcgcaggccgatgcacaggagctgaaaaatgccagagactccgctgaagtggtggaaaccgcattctgtactttcgtgctgtcgcggatcgcaggtgaaattgccagtattctcgacgggatccccctgtcggtgcagcggcgttttccggaactggaaaaccgacatgttgatttcctgaaacgggatatcatcaaagccatgaacaaagcagccgcgctggatgaactgataccggggttgctgagtgaatatatcgaacagtcaggttaacaggctgcggcattttgtccgcgccgggcttcgctcactgttcaggccggagccacagaccgccgttgaatgggcggatgctaattactatctcccgaaagaatccgcataccaggaagggcgctgggaaacactgccctttcagcgggccatcatgaatgcgatgggcagcgactacatccgtgaggtgaatgtggtgaagtctgcccgtgtcggttattccaaaatgctgctgggtgtttatgcctactttatagagcataagcagcgcaacacccttattccagctggcttcgtggctgttttcaacagtgatgagtcatcgtggcatctcgttgaagatcatcggggtaaaacggtttatgacgtagcgtcaggggacgcgttatttatttctgaactcggtccgttaccggaaaatgttacctggttatcgccggaaggggagtttcagaagtggaacggtacagcctgggtgaaagatgcagaagcagaaaaactgttccggattcgggaggcggaagaaacaaaaaacagcctgatgcaggtagccagtgagcatattgcgccacttcaggatgctgtagatctggaaatcgcaacggaggaagaaacctcattgctggaagcctggaaaaaatatcgggtgttgctgaaccgtgttgatacatcaactgcacctgatattgagtggcctacgaaccctgtcagggagtaatcattgggattatgccgcagcacgtcttaagcaagaacatgctgcggttggatgctatttttttcctgaagcggaaaacattactacagtaccttgaaccttggttttaacattctcgaaatgctctgagagtatatgtgttaagccttcttcggaatcttttgtgtttgaaaagatgcctttctgattgtaaatgcgcatcagtttttgaccgaagctattgtgcacaactccatcgccaagaattgtggctccgtatagagttccatcgtcagttaaggcctgcgccgcattgcgtattacacagctttttgtagatatatttccaggcaggcagtgaagaaggtaagacatggaaatggaatcaaattgaccatgtaacgccgcgggataaggttcaaaaacatcatggctaattttatgtttaatttttgattccccagcccttgtagatgccgcgttcaggctagcttcgttcaaatccattaaagatatcagactactctcaggtacgtgagtaaggtaaaacccagttccaacaccaatatccagatggttgttacctaaatgttccagaaagtgtggaagaaggtgttcctttgtaggacatccccatgcaagccgatttgatactcccaaaacccaccagtcataaagctttagggtaagtggtgtgtaaattctagccccatcatctgtgtttttttattaatttcaccatgttatagttttatttgtgaattaaatcaattatggcaatgaattacaaggggttaaatgctgccgcagcatagcgatattgaaatagcctggtatgcttcaatacagcaggagccgaatggctggaagaccgtcaccacacagttctacatccaggaattcagtgagtatattgcgccactgcaggatgctgtagatctggaaatcgcaacggaggaagaaagatcgttgctggaagcctgaaaaaagtatcgggtgctgctaaaccgtgtggacacttccgtagcaccagatatcgagtggcttattcaaccataataaacagtatgtatatcataggttattaattgtgagttttttcggtgtgttatttgtttgtttgatgttatgcttttgcgccccaaaaggttgtttagatgtattttatcaattgattttcaatatcgtttaataaagaaaaattaagcaagctggatgttggttttttgttaattgaatggttctaataatgtttttttactgttgttgaatgtgacttgataagaaatgcaagtaaaaatgatactctttttattttaaattcaaacggttgacatatatatagcaagaggtttcaggtgcgttgtagtgagtttatgttaataaaaagcatagtaagcgttgaaaaatgtaactttgaaataagttagaataaaaaacaacatacatataataatttaatcttaaatgaaatttattaaaatttgcaaactataattttgtgtataaaaatataaatgcacatcatcctgattatgattgtgtatttaattggttgttatttgactactatcaacttgttttaattttatgataggtgcaagatggattatgtttgctccgtagttttcatctgtcaatcatttgatttaattataaacaggagagttatctcgttcaaaaaaaattcattgtttattgtaagcgacaaaattagaagggagttaccagtatgcccctctaaactaagaattgttgatatagataagaaaacatgtttatccttttttatcgacgtgaataatgagctgcctggcaaatttactcttgataagaatggctatattgctgaagaggaacctccattatcgcttgttttttctctgtttgaagggattaaaatagcagactcacactccctttggttaaaagaaagactatgtatatccttacttgccatgttcaaaaaacgcgaaagtgtaaattcatttatactaacaaatataaatacatttacctgtaaaattactggaataatcagttttaatattgagcggcaatggcatttaaaagatattgcggaattgatttatacgagtgaaagtttaataaaaaaaagattaagggatgaaggaacgtcatttactgaaatattgagagatactaggatgaggtatgcaaaaaaactcataacttcaaactcttattctatcaatgtcgtagcccagaaatgtggctataacagtacttcatatttcatatgtgcatttaaagattattatggtgtcacgccatctcattattttgagaaaataatcggcgtcacagatggaataaacaaaacaattgactgataatgtttattacaagttgtctacatgttaattataatattatacagcgttttttttgatgtgatattctggaaccattaatttgtaattgggttgctgtcgcctattttatacatactataattgatggttttctatgtgatttagttaataaccttctgggtttattttaagggttaattgttacattgaaatggctagttattccccggggcgattttcacctcggggaaattttagttggcgttcttaaaatgtgtacttaagaccagcagtagtgatgaagttatagttttctatacctgctccatttttgctgtagtctgaagtgttattattgtgatcataaagtgaagtattaccttttttattcgtaacccgattccatgcgccttcaacataaacttttgcgttaggtgtgacgtaataacctgcattgactgcaacagaatagtaattttggtctttgaccttactgcgataagtgattctttttcccgggtcatagtgttcatcgttatcagatgattccacccagccgctgtatttaaatgtgccaccgagttcaaaatcttcataacgataacttccagtcaagccaatgtagggcattttaaaacgttgtttgtagccgattgctctttctccattcgggaaggagccgatatcatctctgaatccctcctcagaactgtagatataggaaccacctctggctgtaaagctataacggctttcctgatatccggccatgagtcccaggcggtaattgggttcgttgaggagccagcctttgatattcagatcaaattcgttggcataattgagttgtgtatcagggtgtctactttcatccgtccaggttccggggttactggaatccatccagtcctgatcgaccatattgccacctcggctgccgagagttgtccagccagcagccccgatagatatctggggcatcaaatcccaattaattgcacctttaataattgcagcgttattgaatttccagtcgagttgactgacttttcggcctccttcttcggctagataaacacgctcttttgtttttccgctcagagttccaagactaatgtccgcatttatgttgtcaggagtaaacgataaagtctcggtagaagcaaaagagctgatcgcaataggggttgtcaggactattcccagaagtttcgcccgcataaaagttctccattcaatcgttttaatgattgaatatgtattttttatatctaacttaatgagtcaattacatattgctccactgtttatattttgtttagtattgaatgattatcacaatgcgctatctgtttttggtttaattatctgttattgtttcatatttcggttttactgtgtggtttttttatgcttttgtggtgcttttatctatttaagtgccatgcctttagaggcatataagcgaaaatagcatgaggtttatcctcaattactatgttttttagtacaaaaaagagggacaaaactgagacacataaggcctcgcaatggcttgcaaggctttacatgttttgaggtagtgggacgtgtgagcgcagagatggcgcggtaagttgttgacttaaaatgtcgttctaggaacttctaagtcgtgggccgcaggttcgaatcctgcagggcgcgccatttcttcctcatttatgcccgtcttatccgtttccgctttgcccttcaccacatcactttttgtcgctgtttggcgagataattcaacggtgtcaggccgtaaaacgccttaaaaacagagataaagtacgacgtgctgctatagccacataattgcgccacctgagtgatatttttgttatccatcaataacatctgtacggcgtaacgcatacgacactctgtgacaatctggctatagctggtattttcgttttttaatttctttttgagcaggctggggcttaaacatagcgaactggcgacaattcgcagattccagtaatgctgaatatcgctttgaataatgcggcagacgctgtcgcggacgctgctgcgtaagatatacatcagtagggcaataaaccgcgattgctcaagaaagttagacaatacggtaaaaagcaatgcgcgcgtcaactccgcttcgcagggtctgctgggttgctgcttgctgtggttggcggctagccggaacacttccggtgtacggctatgacaagcgataaccggggttgccagccgcgaccagggctttacacaggttaagttcttatttaaaaacaacagataatcgttgatgatgttacggttgatgtgggtgattaatacgtgatttaacgttgagagttcaatgacgttattgttgcacgcgaaggcggccaggtagtttttcggaagggtaaacgtagcatggttattgacgcttacctctacctctttttcggtcaggatcaccacgcaaggttcactgctgctcaattgcatttcgcactcctcagatatcagaaactccgctcaaaggatctatgcttcctgcatgagtgatcggcccgttcgccgataacgatcttctttctttagcacgctttttagcaattaatcttgatggaattctgatgagagcgaaagaggtaagccaggtcgtacccgacttacctggaggagatttaatactcgagaatgccgtgcgcgacgggcaaatagcgcagagagaaatagagagtgtctttaccgcaagaggaacgtttcgctaacagcgaggcaatttctgcgtccggtttcggtttcgctgtaaaggttttgcctttgccggcgacaaaaagttcataaacaacgccgctggcaggggcgggactttggcaatcggcgctggcctgtaaataacgttcacgctgttcagcggtcagtttatccacgccgctgccatcctgtacccagacattaacgccggttgctttaacgtgttccagcagttggcgatagccatcgggcgacatgtttccggcgaaaaaactactgatataaaccggttttgctgaaacatcgctaatcagccgctgcgcgttgtttaaccatgttagcaaaggctgacgggcggcttcgctgcgccagttcaggtcgtcaatttccgcgctgatgtaccagccatccggcgttatgccaggcgcggcgctccataatctggcttgctggagatcggcagccagcaggcgattaagatagctttccagcgctgcggacgactgtttctggtgcataaaaaattccggatcggcgttcagcccgacaataagcttcagaccagcctgttgcgcagctgcggcccgcttaaacaataacgtgcgctgttctggctgggtaaatgcatcgccgtaacgggtccattgcaaaacaagggtatcgaagccttgcaaacgtaactgactcatcagcccctgccactgggtatcggtaacctgactatctcggttttgtggttgccagataatacctttcatcgcaaaggaaaaagggctgaccaaaagcagtgtcagcaatacgaaaatgaacttacgcatttaccagtgcactccaatggtgagaaacgcgttgttgcgctctccgttacgttgattaatcgccttaaaggtatgttgatactcgacgccgagactgactttgtgcggccaggcgtcgtagtgcgtctcgccggtccagatattccagcggaccccgactccgccaagctgcgcgccctgagtgcctttatcacgatagccgttgtcctgaacgtgagcgtaaggctcaatagtctgtccgttagctaccttctgatgccagctgacgcgataatctgccgtccacgcctgaatatcctggcggatatattgcgccgcatcgaggtacaggttttgggcaaaccagcctgaaccgttcgggtgccattcgtcgctgtatttgccgccattaaagaatgaggcgctggcgcgcagcatggtatcggatgcgccattttggccgttcagcggcaactgctgttcgacggcgatgaaaaagatctgatcgcgcagcggcttccagcgcagaccggtgccggacatcggatttttcaccggcatcatcaccccgttttctccggtatcggcaaagacgcggctataaactgagagcaggtcgccttccagcagcatattgcgtccgatgcggtactcggcttccagttgtccgtagctacgatagcttttccctggcgctgcgccgccgacattattgttagcggtactcattgcgccggaacgcaagccgatggaagaatcgaaactgaacgtccagcggcgaccgacctcctcatgcaaacggcggaaattgaagcgttgttgattttgttctggggtcagtggggttatcagcgcctgattatcaatgtcatcaatcaccagccgggcgtagtgctgcgtcgcaggcatgtcatccagacgctggttcacgtaggccagttgtcggatcagtgccggatcgtccggaagccctttatgcgccggttcgagcatttcccgcgactgtgcgatatcaccgctatcccacaaggcgtaaccaagcgctgcctgggtgttgctattattcggttccagttccagcgcggcgcgcaaatcactcaccgcggccgggacattatgacgttggcgataaattgtcgcccgcgcaacgtaagcgttggcagaaggcgcaatattgattgagcgcgtgagatcgttcagtgcgagttccggctgaccaggaatgtaacgttgcgcatgcagccaccagtagagggcattgcttcccagtccacgtttttctgcctgttgtagccagcgatcgcgagccgcaccatttcctgccgcctgggcggtattggcagcagcaagcagatcctcattgctcatgtcgtgaagactgattttctgccaggccgccagtgcggtggcgtagtcctcaacctgatacgcctgataggctaccgcacgatgttgccaggcgctcggttgtcgttgttcggcctgaagccatgcatacaacgccacaccgggtagcgtgtcccgataacactttgccagacggttccaggcggcggcatcgtaggaaggcgacatatcgcccagcaagcgaactattgccgggcaattatctgcaatacccggcaactgactttgccactgacgttgctccgccagcggtaagggtttcgataaaatcgccaccttcgccggcgttgccaggtaaggatgactttccagcagagacgccagtcgcgccattaaagtctggctgacacgcgcatcgccctggaaaggatagcgttgcagcaataaatcggcagcttcgcgtgactgctcgttctgcatcagttgccaggttagttgatccaggcgggtaagatttgccggttcttgctgatacagcaatcgtgccagacgcagagcttcagccttgttacgggtcgccacgctgacagcataacgctcctcaagcatttcattggcggggagggtggcgagcagtttttgcgctgcgtcgtactgaccttcttttaacagcaccggtagcgtcgcgccaacaacatactggcggttgtcggcaaactgtaccgtataattcgccaacgcctgaacggggttagcgctgtatttagataacagatagagccaacttttctcttgtgcgtccgtggtaaatagtggcttattttcaatgagataatgctggaggcgtgctttttcgccacgataagccagcgcggtcgcgtaagtaatatatgactgaggatcggtgaagatcccctgtgattgcagtgccaggatccgatcgtccagctgcccggcaagaagcacgtcaaaccactgacggcgttctgccgcgcttaatgtgttctgctggcgtgcttcattgtatagcgtatctgcctgggaccattgtttcaggtagattgcccgttgcagcagatcggttcgcagcgtttttccttccggcgatgcagcaaacgtcgcatcgttcagttgcgctctggcgacaggtaactgtgccagccgcagggcattctgcccgacttcactgcgacaacgcagggtcggcgcagcatcgcacgctttttgctgggcaagcagttcttcaactgtcgtaacgcttttcacttcaaccggaatagccgccagactgcgctcaagtcgggcatctcctgggtgacgtttcagttgatcctcaagcaacagccgcgcccggtcatcatgaccaaaatggcgataggcttccgcaaggtataaagtcagcggaatattatccggcacctgctggtgtatatattcaaattcgcggatggcggttgcttcgtcgttatttttctgtgccttcagcgctttatcgagacggggataaataacaaaatggcgataatcgctcagccccagctcttctgcgctggtgccgatattgtctgcgagtgcgctggtactcaataaagacgtcagcagtaaaccagaccatccgatgacgcgattaaggttattctccttcattttcggactccagttgcgcaacctgttctgtgtttaaacctgctttgagtaatagtgattgcatcgaaacttgtaattcgcgttgaattgtcaggacgcgatccaacgtttcctggctgataacgccttcggtgaccaaaaacttgccgagcggcagagaactgcgttcatggcgcaataacaacacgttaattgctgaacgattaatatgaccgagcgtggtcagtatttcggcgaacaggaactgatgcggcacatattgccgccagatttcaccggcctgctgttccgtgagccactgatgctgaaccgcattgtacaacattgcccgcggatcgtgaccgcgtcggcgtgcataccagtgacgtaaccctgtgacaatttgtccccgcagaacaatgacgtaacgcactttgcgtccgactttacgcgtcagggccgccagcgaaaccgggtcaataccatcttcactgccgacaattaactcgtcattttccagacgcagcggcagtaccgcataatgcagcgccacggaggccggcatttcggcaatcagcgaggaagggatctgccaggcatcgatggattcccacgccacgccgttttgctctgccagcgcctgtgccagctgctcggcgctaatcagcccctgcatcagcattgaaccgcccaggcgtagaccttcgacgcgattacgcagtgctgtatcgagttgttcttcagtgatgacctgattttccagcagaatttgacctaacgggcgcaacgagcgggtatcgccagtcacgctggggaagtcatgcgttgttttatcccacgccacgcgacgtggatcgccgtgttgaagtacctgttttagcgcgcgccagttggccatgaagttaatcaggttgccccagaaaagacgcaggacggaaagcagcccctgcgtcaggccgtagtagccagtaacgaaaatcacccgctgcacgatgcggttaaccatcaaaccaaagtttagccacagcagggtcattaaccatgcgctgccgctgaaaatagaaaggaaatgccaggcatcgggccacaaactttcatacgccagcaacagcaaaagctggatcatcaccagcatcgcgaggaagctgacaaagttactgattgcccctttgcggtcgcgccagagaaagtagttcagcgtcaggctggaggtccatttatgggttttaaagccttggaaaacaatgccgatgatccagcgggatttttgtcgaaccgcagtcgaaaaggtatcggggaaatattcgcgcacgcagatcatgtttgatgtccgcgcgtgctgtaaaaatttacgctgctcgcgttctttggcttcgtccaccaccggaaaacggacaaaaatttccgtcatacctttttctttcaggcggaagccaatgtcgtaatcttcagtaagactctgcacgtcgaaagcaataccgtcaccgtcagctaacagtgcggtcacggcgcggcggctgaaacaggtgccgacgcctgcgctgggcacttgtccggcgagggcttcacgcaccggaacatctttgccatgcagctctgaaaactcatcaatgtaagtcatgctggtgaagtgcgtccattcgcgttcgaacggatacaccgggatctgaatcagatctttacgctcgaccagatagttgaacagacgcaattccatcggtgaaatcacatcttcggcgtcatgcagaataaaaccagcaaaagcgaaattggcgctacgctcaaattgggtgatggcgtccagcacgttgttcagacagtcggctttgctggtggggccaggacgcgcgcagactaccttatgcacattcgggaagcgagcgcacacttcgtcaacatcacgctgagtatcggggtcgttggggtaggtgccaacaaagatatgatagttttcgtagtcgagcgtggtcgccgccagctcggccatattgccgatgacgcccgtttcattccacgccggaaccataatcgctaacggtttttcatctggtttatacagttcgcggtaactcattcgcgggtagcggcgataaacactcaacttgcgtttaatgcggcgtacccagtagacgacatcaataaaaaaatcgtccagcccgctgatgaacatgatgaccgctaacgttatcgcgattacttttaagccgtagagccaggtagcaaaaacatcaagaagccagtccacacaaaaaccttacattaacgctggttatgtttagggtggcgtatattaaggttttttatgaattgtgacagctttttaccattaataggtatgactattgcggcacgttatttttacactggttataaaagttgccgtttgctgaaggattaagcgggtaatgtgataacaaaccttgtcccccgcgcatccgacgttaccgcaaccgtgcctttatgcgcgacaacaatcgatttcactatcgccaggccaataccgctaccttcaccttttcgctggcgggaggggtcaacgcgatagaaacggtcaaacaatcgcggtaagtgctcgggcgcaatgggcgtaccggggttttcgacgataacttgcaccaggtgatcgaccgtctgacagcgcactacaattgtctctccggttggcgtataacgcagggcgttcgaaagcaggttgcttagcgcccgacgcagcatcagcggatcgcccgcgacctgacacttgtcgccaacaaaccgcaactccacgccgcgatcttccgctaacgcctcgaaaaaatcgaacactttgccgacttcatccgccaggttgagcattttcttttcggggattagctggttgttatcggcctgagcgagaaacagcatatcgctgaccattttcgccattcgcgtcagctcttcgagattagagtagagcacatcttccagctccttctggctgcgcgactggctgagggcgatttcggtttgcgttatgagattcgtaattggtgtgcgaatttcgtgagcgatatccgctgagaaattggactggcgggtaaagacatcctcaatacgctcgatcatatggttgaacgacagtaccagctgttccagctcaatgggcacggtctgcgggtcgaggcgaacgtcgagatctttcgaggtaatattctggatttgacggctgacgctgcggatcggcgcgtgacctttatgtaccgccaacagtacgataaagacgatcaggatgctgattaccgatgcggtcataataagtttattcatcaaatcatttatgtaatgaagatgaaaatcgatcgaaagcgcgatgtagagcgtataaatcggtttgccgtccaccaacgggccaaccggcaagttaatcatccgccagttgctgtgttccatatgcccgtgaccgtggcctggcatcatcatcgtcgggccggaaaggagatacacctcgccaccctgagcgtctttatcgggtatggcgtcacgcgtaaactcgcggatatccggcgcaccgggggagtgatacaccgttttaccctgactatctgccagggaaatcaacacattggaataaccactgacgatatcttccagcgtcattaagcgtcgggcttgcgtttcgtcagggtgatttagtacccgttcaagggtggcgctaatctcttttaaatcattaatatcctgctcggcaaaatgaacttttactgagtggatcatgatccatgcaaaggcgaaaaacgccgcgatggtggccaggctgataaaaaaggtcaggcgggttgccagcgaaaacgggcgctgaaatggcttactgaccatccggcacctcaagcatgtaacccacgccgcgcacggtctgaattagcttcggctcaaagtcgttgtcgattttgccgcgcagccgcttcaccgccacatcaatagcattggtatcgctgtcaaaattcatgtcccatacctgcgaggcgataagcgagcggggcagcacttcgccctgatggcgaaggaagaactccagcagagtaaactctttactggtcaaagtgatgcgcgtgccgctgcgggtgactttgcggctgacgagatcgaccatcaaatcggcaacctgaaactgactttcgataatcaccgccgccccgcgccgcagtaatgtgcgcacccgcgccagcagttcagcaaaagcgaatggcttcaccaggtagtcatctgcccccaactccagccccttgacgcgatgttcaatggtgccaagcgcggtaagcaacagaatcggcatccctttattggcggagcgtaacatgcgcacgatatcccagccgttcacgtccggcagcataatatcgaggattatcagatcataatcaccggtcatcgccagatggtagccattcagcccgttgtcggccaaatcgaccacaaaaccggcttcggttaaccctttggtcaagtattctccggttttcttttcatcttcgacaatcaacagtttcatatttcctccgcatgttgcccgggcaattctagagtagcgggatcagatggcaatcgcttattggcaaaatgacaattttgtcatttttctgtcaccggaaaatcagagcctggcgagtaaagttggcggcataaaatcaccagaaattatgagcctatgtctccttgtaaacttctgccattttgtgtggcccttgcgctaaccggttgttcactggcaccggattatcagcgtccggcaatgcccgtgccgcagcagttctcactcagccagaacggcctggttaacgcagcagataactatcagaacgcgggctggcgcaccttttttgttgataatcaggtgaagacgctgattagcgaggcgctggtgaataatcgggatttgcgcatggcgacgctgaaagtgcaggaggcacgggcgcaatatcgtctgaccgatgccgaccgctacccacagctcaatggcgagggcagcggcagctggagcggtaatcttaaagggaataccgccacgacacgggagttttcgaccggccttaacgccagctttgacctcgattttttcggtcgcttaaagaacatgagcgaagccgagcgacaaaattatttagccactgaggaagctcagcgcgcggtgcatattctgctggtttctaatgtcgcgcaaagctatttcaatcagcaactggcgtatgcgcaattgcaaatagccgaagaaacgctgcgtaattatcagcagtcatatgcgtttgtcgaaaaacaactgttgacaggtagcagtaatgttctggcgctggaacaggctcgcggggtgatagaaagtacccgcagcgacatcgctaaacgtcagggggaactggcgcaggcgaataatgcattgcaactgttgctgggaagctacggcaagctgccgcaagcgcagacagtaaacagcgacagcctgcaaagcgttaaattaccggcgggattgtcgtcgcaaatcttattgcagcgcccggatattatggaagctgaacacgcgttaatggcggctaatgccaatattggcgctgcacgcgcggcattttttccgtctataagcctgaccagcggaatatcgaccgccagtagcgatctatcgtcattatttaacgccagcagcgggatgtggaattttatacccaaaattgagatccccatttttaatgccggacgcaaccaggccaatctggatatcgccgaaattcgccagcagcagtcggtggtgaattatgaacagaaaatccagaacgcctttaaagaagtggcagatgcgctggcattacgtcaaagcctgaacgatcaaattagcgcccagcagcgttatctggcatcgctgcaaattactttgcaacgggcgcgggcattatatcagcacggcgcagtaagttatctggaagtgctggatgccgagcgttctttatttgcaacccgacaaactttacttgatctgaattatgcccgtcaggttaacgaaatttctttgtataccgcacttggtggcggttgacagcaatatactcgtcatacttcaagttgcatgtgctgcgtctgcgttcgctcaccccagtcacttacttatgtaagctcctggggattcactcgcttgtcgccttcctgcaactcgaattatttagagtatgacttttaactccaggagagaataaatgaaaaaagcactgcaagtcgcaatgttcagtctgtttaccgttattggctttaatgcccaggctaacgaacatcatcatgaaaccatgagcgaagcacaaccacaggttattagcgccactggcgtggtaaagggtatcgatctggaaagcaaaaaaatcaccatccatcacgatccgattgctgccgtgaactggccggagatgaccatgcgctttaccatcaccccgcagacgaaaatgagtgaaattaaaaccggcgacaaagtggcgtttaattttgtccagcagggcaacctttctttattacaggatattaaagtcagccagtaacccaggtttaatgagatgaaaaaaatcgcgcttattatcggcagcatgatcgcgggcggtattatttctgcggcaggttttacctgggttgcaaaggcggaaccgcctgcagaaaaaacgtcgaccgcagaacgtaaaatcttattctggtacgacccaatgtatcccaatacgcggttcgataaaccaggtaaatcgccgtttatggatatggatctggtgccgaaatatgccgatgaagagagttctgcgtctggtgtgcgcattgacccgactcagacgcagaatctgggggtgaaaacggctaccgtcacgcgcggaccgctgacttttgcccagagtttcccggcgaatgtcagttacaacgagtatcagtatgccattgtgcaggctcgcgctgccgggtttatcgacaaggtgtatccgcttaccgtgggcgataaagtacaaaagggcacaccgcttctcgacctgaccattcctgactgggtggaagcgcagagtgagtatttactgctgcgcgaaaccggcggtacggcgacccagactgaaggcattcttgagcggctgcgactggcgggaatgccggaggcggatattcgccgcctgatcgccacgcaaaaaatccagactcgctttacgctcaaagcgcccattgatggcgtgatcaccgcgtttgatctgcgcgcgggaatgaatatcgccaaagataacgtggtagcgaaaattcagggtatggacccggtgtgggtcactgctgcgatcccggagtctatcgcctggctggtgaaagatgcctcgcagtttaccctcaccgttccggcgcgaccggataaaacactcaccatccgcaaatggacgctgctacctggcgtggatgccgcgacccgcacgctgcagctgcgtctggaagtcgacaacgccgacgaggcgctaaaaccgggcatgaacgcctggttgcaactcaacaccgccagcgaaccgatgctgctcattccgtcacaagcgctgattgataccggcagcgaacagcgggtgattaccgttgatgccgacgggcgctttgtaccgaaacgcgttgctgttttccaggcatcgcaaggcgtcaccgcattacgctctggtctggcggaaggtgaaaaggtggtttccagcggcctgttcctgattgattccgaagccaatatttctggcgcactggagcggatgcgctctgaaagtgctacccatgcgcattgagggaataaccaatgattgaatggattattcgtcgctcggtggcgaaccgttttttggtgctgatgggcgcgttgtttctgagcatctggggcacctggaccatcattaatacgccagtggatgcgctgccggatctctccgatgtgcaggttattattaaaaccagctatcccggtcaggcaccacaaatcgttgaaaatcaggtgacttatccgctaaccaccaccatgttgtcggtgcctggcgcgaagactgtgcgcggtttctcacagtttggcgactcttatgtgtatgtcattttcgaagatggcaccgatccgtactgggcgcgttcgcgggtgctggagtacctcaaccaggtacagggtaagctgcctgcgggagtcagcgccgagctggggccagatgccacgggtgttggctggatctatgaatatgcactggtggatcgcagcggtaagcacgatctggccgatttacgctcattacaggactggtttctcaaatatgagctgaaaaccatccctgacgttgcggaagtggcgtcggtgggcggtgtggtgaaagagtatcaggtggttatcgatccccagcgcctggcgcagtatggcatcagtctcgccgaagtaaaaagcgcgctggatgcttcaaaccaggaagcgggcggttcgtcgatcgaactggcggaagcggaatatatggtgcgcgccagcggctatctgcaaacgctcgacgactttaatcacatcgttttaaaagccagtgaaaatggcgtgcccgtttatctgcgcgatgttgcgaaggtccagattggcccggagatgcgccggggcattgccgaactaaacggcgaaggcgaagtggcgggcggggtggtgatcctgcgatccggcaaaaacgcccgagaagtgatcgccgccgtgaaggacaaactggaaacgctgaaaagtagtctgccggaaggcgtggagatagttacaacatacgatcgcagccagctcattgaccgcgccatcgacaacctcagcggcaagttgctggaagagtttattgtggtggcggtagtctgtgcgctgtttctctggcatgtgcgctcggcgctggtggcgattatttcgttgccgctggggttgtgtattgcttttattgtcatgcacttccagggactgaatgccaatattatgtcgttgggtggcattgcgattgccgtcggggcgatggtcgatgctgctatcgtcatgatcgagaatgcgcataaacggctggaagagtggcagcaccagcatcctgacgccacgctggataataaaacgcgctggcaggtgatcaccgatgcgtctgttgaagtggggccggcgctatttatcagtctgctgattatcacgttgtcgtttatcccgatcttcaccctggaagggcaggaagggcgtctgtttggcccgttggcgttcaccaaaacgtatgcgatggcgggtgcggcgctgctggcgatcgtagtgatcccgatcctgatgggctactggatccgtggcaaaattccgccggaaagcagtaacccgctcaatcgctttttgattcgtgtttatcatccgctgttgctgaaagtactgcactggccgaaaaccacgctgctggtggcggcgctttcggtgctgacggttctctggccgctcaataaagttggcggggaatttttaccgcagatcaatgaaggcgacttgttgtatatgccatcgacgctgccggggatttccgcagcagaggcggcgagtatgctgcaaaaaaccgacaagctaattatgagcgtacctgaagtggcgcgggtatttggcaaaaccgggaaagcggaaaccgccaccgattctgctccgctggagatggtagaaacgaccatccagcttaagccgcaggagcagtggcggccaggcatgacgatggacaaaatcattgaggaactggataacaccgtgcggctgccggggctggcgaatctgtgggtgccgccaattcgtaaccgtatcgatatgctctcaaccggcattaaaagccccatcggcattaaagtttccggcactgtgctggcggatatcgacgcgatggctgagcaaattgaagaagtagcgcgaacggtgccaggcgtagcttctgcgcttgccgagcggctggaaggtgggcgctatatcaacgttgagattaaccgtgaaaaagccgcacgttacggtatgacggtggcggatgtgcagttgtttgtgacttctgcggtgggcggggcgatggttggcgaaacggtggaagggattgcccgttatccaattaatctgcgttatccgcaaagctggcgcgatagtccgcaggcactgcgccagctgccgatcctgacgccgatgaagcagcaaatcaccctggcagacgtggccgacattaaagtctctaccggaccgtcgatgctgaaaaccgagaatgcgcgcccgacgagctggatttatatcgatgcccgcgatcgtgacatggtgtcggtggttcacgatttgcaaaaagcgatagctgaaaaagtgcagttaaaaccgggcaccagcgtggcattctccgggcagttcgagctactggagcgcgccaaccataagcttaaactcatggtgccgatgacgttgatgattatcttcgtgctgttgtatctggcgttccgtcgggtgggcgaagcgttgctgattatcagcagcgtaccgtttgcgctggtgggcggcatctggttgctgtggtggatgggctttcatctttccgtggcgacgggcactggctttatcgccctcgccggggtcgccgccgaatttggcgtggtgatgctgatgtatttacgtcacgccatagaggccgtgccgtcgttgaataatccacaaacattcagcgagcagaagctggatgaggcgttatatcacggcgcggtcctgcgcgtgcgcccgaaagcgatgacggtggcggtgattatcgccggtctgctgccgattctgtggggaacgggggctggttcagaggtgatgagccggattgccgcgccgatgattggcggcatgatcaccgcacctttgctgtcgctgtttattatcccggcggcgtataagctgatgtggctgcaccgacatcgggtacggaaataaaagcaggataccccgtttaaccgtgtggattgtgtcttgcgacgatgggcactaaatgttaaaaggtgcccctcaacaaaaaagacacacaggggaaaggcgtgaaaaacgcgtcaaccgtatcggaagatactgcgtcgaatcaagagccgacgcttcatcgcggattacataaccgtcatattcaactgattgcgttgggtggcgcaattggtactggtctgtttcttggcattggcccggcgattcagatggcgggtccggctgtattgctgggctacggcgtcgccgggatcatcgctttcctgattatgcgccagcttggcgaaatggtggttgaggagccggtatccggttcatttgcccactttgcctataaatactggggaccgtttgcgggcttcctctctggctggaactactgggtaatgttcgtgctggtgggaatggcagagctgaccgctgcgggcatctatatgcagtactggttcccggatgttccaacgtggatttgggctgccgccttctttattatcatcaacgccgttaacctggtgaacgtgcgcttatatggcgaaaccgagttctggtttgcgttgattaaagtgctggcaatcatcggtatgatcggctttggcctgtggctgctgttttctggtcacggcggcgagaaagccagtatcgacaacctctggcgctacggtggtttcttcgccaccggctggaatgggctgattttgtcgctggcggtaattatgttctccttcggcggtctggagctgattgggattactgccgctgaagcgcgcgatccggaaaaaagcattccaaaagcggtaaatcaggtggtgtatcgcatcctgctgttttacatcggttcactggtggttttactggcgctctatccgtgggtggaagtgaaatccaacagtagcccgtttgtgatgattttccataatctcgacagcaacgtggtagcttctgcgctgaacttcgtcattctggtagcatcgctgtcagtgtataacagcggggtttactctaacagccgcatgctgtttggcctttctgtgcagggtaatgcgccgaagtttttgactcgcgtcagccgtcgcggtgtgccgattaactcgctgatgctttccggagcgatcacttcgctggtggtgttaatcaactatctgctgccgcaaaaagcgtttggtctgctgatggcgctggtggtagcaacgctgctgttgaactggattatgatctgtctggcgcatctgcgttttcgtgcagcgatgcgacgtcaggggcgtgaaacacagtttaaggcgctgctctatccgttcggcaactatctctgcattgccttcctcggcatgattttgctgctgatgtgcacgatggatgatatgcgcttgtcagcgatcctgctgccggtgtggattgtattcctgtttatggcatttaaaacgctgcgtcggaaataaggcattcacgctacatccgacaaaacgatgtcaaccatccgaaaccgctctcatccattcgatgagagcggtttttttaattactgcttaaatgcacccgccagagagcgaatatcattgccggttggcgactgatgaagtcgcagaccaaactcttcgacaatcgcaaatatgtgatcgaatatatcagcctgaatgctttcatattccagccacaccacggtgttagtaaacgcgtagatctcgagcggtaaaccgttatcacctggagccagttggcgtaccattaaggtcatatctttacgaatccgcggatggttacgcagatattcgttcagataggcacgaaaggttccaatattggtcattcggcgcagatttaataccgactccgtagaaccttgctggcgattccactcattaatttcctgatggcggctggttaaataaggctttaacaaatgcgctttattcagacgttgcatttcgtcttcatcaagaaaacgaatactggtgacatcaatactgatactgcgcttaatacgtcgcccgccagatgctgacatcccgctccagtttttaaaggagtcagaaaccagagaccaggtgggaatagtggtaatggtattgtcccagttacgcactttgacggtggttaacccaatatcgatcaccgcgccatccgcgccgtatttcggcatctccagccagtcgcccagtttcagcatatcgttcgcggaaagctgaatacctgccaccagaccaagaatcggatctttaaataccaacatcagcacggcagccattgcaccaagaccgctgatcagaatcgctggcgactgaccaatcagcagcgagatcatcaaaatgccgaccagaatcgcgccgatcagtttaatcccctgaaatatccctttcagcggtaactgagatgctgccgggaatttctgcgccagattcaaaataacatccagcaacgagaagactgaaagcagcgcatacatcatgatccacaactgcgcgcaggtagtcagaatatctgccgcttcggtgcctttttgcagccagaataccgcctgaatattgacgataatcccctgcagggtaaaagctaaacggtggaagagtttattctgggtaatgatttgcaaccaaagccgtgaactggcgatggcacgtttttcgaaggtccgcagtaccacccaatgcaaaataatatgcaccacgacggcggtcagaaaaataataccgaaaatcatcaccatcgaggtggtgtgatcgatctcaatacccgctaaatcttcaacctgggatattaaatcctgcataacgtctcctttatacaacagcagcctatgatgacggctgaaacagggttatgcaaatcaggagaatctgagaggaaatagccgggcagatgcccggcaagagagaattacacttcggttaaggtgatgttttgcggcagacgagatttcggcagcgtagcgttaaaatcttcaacgctgtgatgacctaccggaacaaccaccagactggtgtagcctttctctttcagaccaaattctgcatcgaggatggcggcgtcaaaaccttcgatgggtaccgcgtccagacccagagccgccacgccgagcaggaagttaccgacgttgagataaacctgttttgccatccactctgcatcatcatgcagatctttacggtgcatatcagcgaagaacttgcgacctttatcgttcgcggctttcgcttccggcgtggcaaagcggccatcggcatcttcctggtcaacaaccagcttcagccagacatcgtccatcgcggtttttgcacagaacaccacgacgtgcgaggcatcaagcattttacgctcgttgaacacgtaattaccggcagcggatttggcaacacgcgctttaccttcttccgtgctggcaacaataaaatgccacggctgggagttggtgctggatgggctgtattgcagtagcgttttgatctgctcggcctgttccggggtaagttttttgctggcatcaaatgccttagtggaatgacgctttaaggcgacagaaatgatatccataaagactccatgtgaaagtaattttgcgtgccagcagattacaaggttcaacgagaaatggtaagcgagaaaaatgcgctatagatttccgctttagcctggacgcactcttttttgatcgcgtttagccagaccatcaaccaccagattccacgaatcgttgatcagatcgcgaagtaacgcttcggagatttcttcgccgggatacactgaaatccagtgctttttattcatgtgataccctggcttaatgcttgggtatatttgctgatttaacagggatttttgtggatcggacttcagattgataaaggggacgccgcgtagctccgacgacagcataaaaatcttgccgccaattttaaaaacatcgaactccgggccaaaaggccagcaaagctcgacaaagggtaactcaagggccaggcgtttcgccgtttcgtgcagtgattgcttatccataaacgttcctttaggcgaaggagaataagcaaagtatgccgcgaagtacggcgataatcgacgtttaatccgccagcgagaaccagcgtcgccagataaagcgcagaacaaaatactcaatagcgcccagcactaaaaaccacagacaaaacaataaagtgtaaagctgactaagatccatcagatggaacatggtcaccagtttttgtgccagcgccagccccagtgcgggggcgggcagcagcaggcaagagaggaaagccatcagcaaaatgcctgctgcggtggtcaaggtttctaaagggtgtttcataacattgttaaatgtaagttaaaacaccattgtcagggatattcttctgtaaggcaattcccggcttagtcaccggcccagatctcacaatgctttttcaccagcccaatcagcgagccgccatcggcgacgaaatcgcgcattagctgcgcttcattcagaccgctgacgacctggcgatgcagggcctcaatcgcgctcgatgcaccaattttatgtgcggaaggggcgattttttccagcaatcgcaaggtatcttccgttagcggtcgacgatctccagtgtgcggatcggtgatgacgccttcaagcccatagcgacaggcctggaaacggttgaatttatacagcaggtaatctttttcctgatgtttaaacgggcgttccgtcagtaaccagtgggcggtagcctgaattaatcccgccatatttactgcgtggctaagggttaacggggtatccatcacccgaacctccaccgtgccaaaatgaggactggggcgaatatcccagtgcagatctttaatgctgtcgatcatcgtggtgtaactcagacagcgaaacagggcttcaaattgttgccagttactgacccacggcatcgggccattatcaggaaaggcggaaaaaatattcggtcgtgaggaggcaaaacgcgtatccgttccctgcatatatggcgacgcggcggaaagggcgataaagtgcggcacaaatcgtgacaagccgtgcagcaaataaatggcgtcatcgccactggcgcagccaacatggacatgctgaccaaaaacggtcgcctgctgaatgagataaccaaagttttccagcgtgcgttgatagcgttcgttatcgcatacctcctgacgctgccatttctgaaacgggtgcgtgccaccgccgcaaatttccagatgatggtctgtggctgcctgcaatacgactttctgcatcgctgaaaactgcccggcagcctggttgatatcacggcaaacatccgtcgccagctccagcatactttcggtgatatcgtgctttacctctccggccgtgatcttatttttaaccgcgtcaatcagcattgaagagtcctggcttaagtcatagcccggcggattaaccacctgcatttccagttcaataccgagggtaaaaggttcagaaacatgaaaatcgggtaatggcataggtttctcttatgttggcgttttctattcagtatagaagtcggagcggctgggcgagatgcggaagttctggaatgtttcttttttttggtgatggtgaactgatggtgcctgaagcaatttggctacttttgcaatgtgacaagttatggcagtgctgactggtggcgaagaattttgacgattgagtcatgcagaaaaaaacgggttcagcttcagttgattaaatgaggagtgagaagtccgaaacaggactcactgtataaataaacagctattttgttgaggaagggtaagataacggcgggtgcctgaagctttccggtttcaggtttactctgaggtctggaaagatgaagccccaggagatatttctatcaaccctggggctgccactccaaacccgaacaatttggatggtagtcccttcttcgcatggaggcaatataaacatgctgacgaaatatgcccttgcggcagtcatagtgctgtgtttaacggtgctgggatttacgcttctggtcggagactcgctgtgtgagtttacggtgaaggaacgtaatattgagtttaaggctgttctcgcttacgaaccgaagaagtagccgttgtgcggggagtaatcccataagcgctaacttaagggttgtggtattacgcctgatatgatttaacgtgccgatgaattactctcacgataactggtcagcaattctggcccatattggtaagcccgaagaactggatacttcggcacgtaatgccggggctctaacccgccgccgcgaaattcgtgatgctgcaactctgctacgtctggggctggcttacggccccggggggatgtcattacgtgaagtcactgcatgggctcagctccatgacgttgcaacattatctgacgtggctctcctgaagcggctgcggaatgccgccgactggtttggcatacttgccgcacaaacacttgctgtacgcgccgcagttacgggttgtacaagcggaaagagattgcgtcttgtcgatggaacagcaatcagtgcgcccgggggcggcagcgctgaatggcgactacatatgggatatgatcctcatacctgtcagttcactgattttgagctaaccgacagcagagacgctgaacggctggaccgatttgcgcaaacggcagacgagatacgcattgctgaccggggattcggttcgcgtcccgaatgtatccgctcacttgcttttggagaagctgattatatcgtccgggttcactggcgaggattgcgctggttaactgcagaaggaatgcgctttgacatgatgggttttctgcgcgggctggattgcggtaagaacggtgaaaccactgtaatgataggcaattcaggtaataaaaaagccggagctccctttccggcacgtctcattgccgtatcacttcctcccgaaaaagcattaatcagtaaaacccgactgctcagcgagaatcgtcgaaaaggacgagtagttcaggcggaaacgctggaagcagcgggccatgtgctattgctaacatcattaccggaagatgaatattcagcagagcaagtggctgattgttaccgtctgcgatggcaaattgaactggcttttaagcggctcaaaagtttgctgcacctggatgctttgcgtgcaaaggaacctgaactcgcgaaagcgtggatatttgctaatctactcgccgcatttttaattgacgacataatccagccatcgctggatttcccccccagaagtgccggatccgaaaagaagaactaactcgttgtggagaataacaaaaatggtcatctggagcttacaggtggccattcgtgggacagtatccctgacagcctacaaaacgcaattgaagaacgcgaggcatcgtcttaacgaggcaccgaggcgtcgcattcttcagatggttcaacccttaagttagcgcttatgggagtaatccccgcatatccggttgtcaggtcaggatggtaaggcacctgctttacactttcgcccgtggtcagtgatggctgcgggcgaatcgtaccagatgttgtcaattaatcgtgttggcacagcgttatgactatcttttcttttatctgccagtgcacagcaaacatctcattctcacgatgaatgatgacctgctgtttattccagctaattatctgatagtccagaaaacctgcatcagtttggatctcacttgccttaaatgcgctctctttggcggaaaatgccagtgtcagcgccagagaaaaggctaaaccgcagtctgcgagtcgctcgtgttccgctggtgtaataatgttgtctgtcaattctcttgcggtttgtacagaaaaaatttcttctatatcaatgccaatcggttgacgagataccacggctaatgccgtagtcccacagtggctaatactgccgtatacctccgcaggccagacaggttggcgtagctcgccgattgcgggcacacatttatagccatattcccgcaaagcataaacagcagcgatccgtccggctaaatgctctgttttacgtttacgtccagcgtgttgcagttgtgcgtagtgcggcagccagagtaaatcctgctcacaaaaattcgccggatcgaactcaacaaaatgcagcgtatgtccggcaaaggggagggaggtatgcgtagttttcatatcgaccatattcgagactgatgacaaacgcaaaactgcctgatgcgctacgcttatcaggcctacatggtcctgcaatatattgaattggcaagatttttgtaggccggataaggcgttcacgccgcatccggcatgaacgacgcgcactttgtcaacaatctgacgttagcatcagaagtgggtgtttacgctcatataccacgtacgtcccggctcgttataggtatacgccccggcaccggcgatatagttggcccctgccaaatcgcccgtggtctgggcattacccgcacgccacaaacgtttgtcgaacagattgtccacgccgccggtcagactgacattcttcgtcacatcccaggtcgcgctcaggccaacaatgctgtaaggactaatttctttggtttccggtccaaccgctggctgacctttatagttgtacttcttcggctgctgcttgccgtaccaggtgaaggtcgtttgcatcgacaaatcttcccgtgcctgccagctcagcgttgagttcaacgtatactccgggatgatcgacaaacggtcgcccgtggttttgttttcactcttcagcatataagtgatgttattggtccacatcaccgtttcgctaaccggtacgtttaacgatccttccagaccttcaaccaccgctttcggcacgttatcccactgatagagatcggtgccgactgcgttttgccctacagccacatagcccgcttcaatcttattgcgataatcgttacggaaccaggtgacgcccgccagccacccgtcgcgtttgaactccagaccaatctctttgttgatgctggtttctgctttcaggtcatcgttaccttgcagatagcagccgcccgcgctggcatagcaaccctgacctttactgtagagaatgtagttcgggttagtctggtacaggctcggcgctttataagcacgggcgatgcccattttcagcgtgaagtcatcgcctaaaccttgcgatatgttcagcgccgggctccagttattgccgacaatactgtgatgatcgaaacgcagccccggcgttacgatggtgctgtcagtcagctccatgttgttttcggcaaacagcgagaaaatttctgcttttgaatacgggctacggtcggtggtactcacgccatcaatagcgccaccggtattcgttccggtcagtgcctgggtgttggaacttaagtccttcatccgttgctgattccactccgtacccagcgtcagcgtctggttaacgaggaaatcaatcggcaggttaacttcgctgtgcagcatcacgtcatcaagatcgatatcgacgaaatcctgtgtcgctttttcgttaaatttcccttcggtaccgcccgccagaccttccggaatacgcgagttacgggtgtgttcgtactgcacccagttgctggtggtcacgccgttatcccagccaccgttccaggtcagcgcgtagttctggcgatacagacggttggtttcatcgccatatttcgagcgggtataggaatcggagttggtattctgggtgtcgcccgcatacaggttaccctggcggctgtaacctgcttccagttccagcgattgcaatggcgcgaaatcccagcgcaccacgccattaatatctttgttgattaccccttcgcgcccggctggtaacgtcgtggcatacgttccggcacgcgcggactgatggccctggttgatatcccacgcgtcagcctgggttttgtcgaggttgccatacaaacggaagctgaattcgtcgcccagcggaccggtcaggctaaagttagtgcgtttggtggcaccttcctctttatgttctggcgcattgaaatatgcgtcccaggagccgtgccactcgccgctgccttttttggtaatgatgttaaccacgccgcccgccgcgccgttgccataacgcgcagctgccggaccacgcagaacttcaatacgttcaatcatttcaggtggcacccaggaagtatcaccacgggtatcgcgctcgccacgccagccctgacgcaccgagttacggctgcttaccggcttgccgtcaatcaaaatcagcgtgttttccggacccataccgcgaatatcaatctgtcggttattcccacgctgaccactggtggagttaccggtcaggttaacgcctggcatggtacggatgatcttcgacacatcgcgggcaaccgggtttttgcggatttcatctgcggtgatggtcgaaacgccaggcgcctgtaagttctgctcggcggcggtaacgacaatagtatcgtcatgtgaaacaggagtatcggtcggctcttgtgcctgcgctaccccataaatccccagattgaccaacaaggccagggaatgaatcttcttgttcattgttttattcctgcatttttgccacgaattgcaactgtcgggcatggtcgtcatcaacacgacgcatcccgctaccgcgaaaacctttgatcctgaaagacacgcagtgcagttggttaattaatgtccgcgcttcccacggcgcgccattacgctattgcaaatgcaaatagttatcaataatattatcaatatatttctgcaatcaatgaaaaattgcacagtaaacatggggttatggtgtgacggcgttaaaagtaggaagtgagagctggtggcagtcgaaacatggcccggaatggcagcgtctgaatgacgaaatgtttgaggtcactttctggtggcgtgatccccaaggttctgaagaatactcgacgataaagcgcgtatgggtctacatcactggtgtgaccgatcaccatcagaacagccagccccagtcgatgcagcgaattgcaggcactaacgtctggcagtggacgacacaactcaatgccaactggcgcggcagctactgctttattcccaccgaacgcgatgacattttttctgtaccatcccccgatcgcctcgaattgcgcgaaggctggcgaaaactattaccccaggcgatagccgatccgctgaacctacaaagctggaaaggcgggcgagggcacgctgtttctgcactcgaaatgccgcaagcgcctctgcaaccgggatgggattgtccgcaagcgccagaaatacctgccaaagaaattatctggaaaagtgaacggttgaaaaagtcacggcgtgtatggatttttaccaccggcgatgcaacagcagaagaacgcccgctggcagttttgctcgatggcgaattttgggcgcaaagtatgcccgtctggccagtgctgacttcgctgacccatcgtcagcaacttcctcccgccgtgtatgtgttgatcgacgctatcgacaccacgcaccgcgcccacgaactgccgtgtaatgcggatttctggctcgcagtacagcaagagttattacccctggtgaaagctattgccccttttagcgatcgtgccgatcgcaccgtggttgccgggcagagttttggtgggctttccgcgctgtatgccggactgcactggcctgaacgctttggctgtgtattaagccagtcaggatcgtactggtggccgcatcggggcgggcagcaagagggcgtgttacttgaaaagctaaaagctggtgaagttagcgccgaaggtctgcgcattgtgctggaagcgggtattcgcgagccgatgatcatgcgggccaatcaggcgctgtatgcgcaattacaccccataaaagaatccattttctggcgtcaggttgacggcggacatgatgcgctttgttggcgcggtggcttgatgcaggggctaatcgacctctggcaaccacttttccatgacaggagttgaatatggcattcagtaatcccttcgatgatccgcagggagcgttttacatattgcgcaatgcgcaggggcaattcagtctgtggccgcaacaatgcgtcttaccggcaggctgggacattgtgtgtcagccgcagtcacaggcgtcctgccagcagtggctggaagcccactggcgtactctgacaccgacgaattttacccagttgcaggaggcacaatgagccagcatttacctttggtcgccgcacagcccggcatctggatggcagaaaaactgtcagaattaccctccgcctggagcgtggcgcattacgttgagttaaccggagaggttgattcgccattactggcccgcgcggtggttgccggactagcgcaagcagatacgctgcggatgcgttttacggaagataacggcgaagtctggcagtgggtcgatgatgcgctgacgttcgaactgccagaaattatcgacctacgaaccaacattgatccgcacggtactgcgcaggcattaatgcaggcggatttgcaacaagatctgcgcgtcgatagcggtaaaccactggtctttcatcagctgatacaggtggcggataaccgctggtactggtatcagcgttatcaccatttgctggtcgatggctttagtttcccggccattacccgccagatcgccaatatttactgcacatggctgcgtggcgaaccaacgcctgcttcgccatttacgcctttcgctgatgtagtggaagagtaccagcaataccgcgaaagcgaagcctggcagcgtgatgcggcattctgggcagaacagcgtcgtcaactgccgccgcccgcgtcactttctccggcacctttaccggggcgcagcgcctcggcagatattctgcgcctgaaactggaatttaccgacggggaattccgccagctggctacgcaactttcaggtgtgcagcgtaccgatttagcccttgcgctggcagccttgtggctggggcgattgtgcaatcgtatggactacgccgccggatttatctttatgcgtcgactgggctcggcggcgctgacggctaccggacccgtgctcaacgttttgccgttgggtattcacattgcggcgcaagaaacgctgccggaactggcaacccgactggcagcacaactgaaaaaaatgcgtcgtcatcaacgttacgatgccgaacaaattgtccgtgacagcgggcgagcggcaggtgatgaaccgctgtttggtccggtactcaatatcaaggtatttgattaccaactggatattcctgatgttcaggcgcaaacccataccctggcaaccggtccggttaatgaccttgaactggccctgttcccggatgtacacggtgatttgagtattgagatcctcgccaataaacagcgttacgatgagccaacgttaatccagcatgctgaacgcctgaaaatgctgattgcccagttcgccgcggatccggcgctgttgtgcggcgatgtcgatattatgctgccaggtgagtatgcgcagctggcgcagctcaacgccactcaggttgagattccagaaaccacgcttagcgcgctggtggcagaacaagcggcaaaaacaccggatgctccggcgctggcagatgcgcgttacctgttcagctatcgggaaatgcgcgagcaggtggtggcgctggcgaatctgctgcgtgagcgcggcgttaaaccaggggacagcgtggcggtggcactaccgcgctcggtctttttgaccctggcactccatgcgatagttgaagctggagcggcctggctaccgctggataccggctatccggacgatcgcctgaaaatgatgctggaagatgcgcgtccgtcgctgttaattaccaccgacgatcaactgccgcgctttagcgatgttcccaatttaacaagcctttgctataacgccccgcttacaccgcagggcagtgcgccgctgcaactttcacaaccgcatcacacggcttatatcatctttacctctggctccaccggcaggccgaaaggggtaatggtcgggcagacggctatcgtcaaccgcctgctttggatgcaaaatcattatccgcttacaggcgaagatgtcgttgcccaaaaaacgccgtgcagttttgatgtctcggtgtgggagtttttctggccgtttatcgcaggggcaaaactggtgatggctgaaccggaagcgcaccgcgacccgctcgctatgcagcaattctttgccgaatatggcgtaacgaccacgcactttgtgccgtcgatgctggcggcatttgttgcctcgctgacgccgcaaaccgctcgccagagttgcgcgacgttgaaacaggttttctgtagtggtgaggccttaccggctgatttatgccgcgaatggcaacagttaactggcgcgccgttgcataatctatatggcccgacggaagcggcggtagatgtcagctggtatccggcttttggcgaggaactggcacaggtgcgcggcagcagtgtgccgattggttatccggtatggaatacgggtctgcgtattcttgatgcgatgatgcatccggtgccgccgggtgtggcgggtgatctctatctcactggcattcaactggcgcagggctatctcggacgccccgatctgaccgccagccgctttattgccgatccttttgccccaggtgaacggatgtaccgtaccggagacgttgcccgctggctggataacggcgcggtggagtacctcgggcgcagtgatgatcagctaaaaattcgcgggcagcgtatcgaactgggcgaaatcgatcgcgtgatgcaggcgctgccggatgtcgaacaagccgttacccacgcctgtgtgattaaccaggcggctgccaccggtggtgatgcgcgtcaattggtgggctatctggtgtcgcaatcgggcctgccgttggataccagcgcattgcaggcgcagcttcgtgaaacattgccaccacatatggtaccggtggttctgctgcaacttccacagttaccacttagcgccaacggcaagctggatcgcaaagccttaccgttgcctgaactgaaggcacaagcgccagggcgtgcgccgaaagcgggcagtgaaacgattatcgccgcggcattctcgtcgttgctggggtgtgacgtgcaggatgccgatgctgatttcttcgcgcttggcggtcattcgctactggcaatgaaactggcagcgcagttaagtcggcaggttgcccgccaggtgacgccggggcaagtgatggtcgcgtcaactgtcgccaaactggcaacgattattgatgctgaagaagacagcacccggcgtatgggattcgaaaccattctgccgttgcgtgaaggtaatggcccgacgctgttttgtttccatcctgcgtccggttttgcctggcagttcagcgtgctctcgcgttatctcgatccacaatggtcgattatcggcattcagtcaccgcgccccaatggccccatgcagacggcggcaaacctggatgaagtctgcgaagcgcatctggcaacgttacttgaacaacaaccgcatggcccttattacctgctggggtattcccttggcggtacgctggcgcagggtattgcggcgcgactgcgtgcccgtggcgaacaggtggcatttcttggcttgctggatacctggccgccagaaacgcaaaactggcaggaaaaagaagctaatggtctggacccggaagtgctggcggagattaaccgcgaacgcgaggccttcctggcagcacagcagggaagtacttcaacggagttgtttaccaccattgaaggcaactacgctgatgctgtgcgcctgctgacgactgctcatagcgtaccgtttgacggtaaagcgacgctgtttgttgctgaacgcacacttcaggaaggtatgagtcccgaacgcgcctggtcgccgtggatagcggagctggatatctatcgtcaggattgtgcgcatgtggatattatctctccagggacgtttgaaaaaattgggccgattattcgcgcaacgctaaacaggtaaattaatattatttataaacccataattacagaaaataattatgggttttttatttgtttgatttataggtttgatgaatatttctcttaaatagagtgaatgttgcattcagtggaaggaatttacaaacttcagcttcggataattatcaccaactggtaaagtgagcgccgtggagatttccccctattggactcattttcaggttataccccatgtcatcactgaatattaaacagggaagtgacgctcattttcccgattatcctctggcgtcgcccagtaataatgaaattgatttacttaatctaatctcagttttatggcgggccaaaaaaacggtcatggcggtcgtttttgcgtttgcctgcgcaggcttgctgatctctttcatcctgccgcaaaaatggaccagcgcggcggttgtcacgcctccagaacctgttcagtggcaagagttggagaaatcattcactaagcttcgtgtgctggatctggatatcaaaattgatcgtacagaagcatttaacctgtttatcaagaagtttcagtcggttagcttgctggaagagtacctgcgttcatcaccttatgtgatggaccaattaaaagaggcgaaaatcgacgaactggatttgcatcgcgcaattgtcgcattgagcgaaaaaatgaaagcggttgatgacaatgccagtaagaaaaaagatgaaccgtcactgtatacctcctggacgctaagttttaccgcgccaaccagtgaagaggcgcagaccgttttgagcgggtatatcgattatatctctacgttggtggtgaaagagtcgctagaaaacgtccgtaataaactggagatcaaaacccagtttgaaaaagaaaaactggctcaggatcgcattaaaacgaaaaatcaacttgatgcaaacattcagcgcctcaattattcactcgacattgccaacgcggcaggaattaaaaagcccgtttacagtaatggtcaggccgttaaagatgaccccgatttttctatttctctcggtgcagacggtattgaacgcaaactggaaatagaaaaagcggtcactgacgttgcggaactgaacggtgaattacgtaatcggcagtatcttgtcgagcaattaacaaaagcacatgtcaacgatgtgaattttacgccgtttaaatatcagttaagcccgtcattgccagtgaaaaaagacggtccgggtaaggcgattattgtgatcctttccgcgttgatcggcgggatggtggcttgtggtggcgtgctgttgcgctatgcgatggcatccagaaaacaggatgccatgatggcagaccacttagtttaactatttgcggttgaaggtgccgttcgtccgagcggcaccacaagcggcgttccggcaactggatcgtcaatgatcatgcagcgcagaccataaatgcgctcaatcagttcagcagtgacaatctccttcggcgctccctgagcaacaattttcccttcccgcaatgcaatcaaatggctggcgtaacgacaggcctgattaagatcgtgcagcaccgccgccagggtatagcctttttcgcggttcagttcgcttaacaactccagcaaatcaatctgatgactgatatccagccaggtcgtgggttcgtcgagcagcataattgccgtttcctgggccagcaccatcgcgatccacgctcgctggcgttgtccgccagaaagggtatccacgctttgatctgccagatgagttattcccgtggcctgcattgctttcgttaccgcttcttcatcctctttgcgccagcgggtaaacagcggttgatgcggataacgtccacgcgccaccagctcctgcacggtgatatcgcccggcgtggtagcattttgcgccaacagaccaatccggcgtgcaacctctttactggcgtaatgttgaatgtgctcgccatccagccagacatgcccatgagcaggcgtcatcaggcggcttaaggtacgcagtaacgtggatttaccgcagccatttggcccgataattgccgtgaagtgaccatcaggtatttctacagtcagattttccgcaacggtatatttgccatatcccagggttaactgttcgccgcgcaaacgggctactgattcggtcattttttgcgagactcctgaattaacaagacgataaggtaaataccgccgaggctgacggtaacgacgccaaccggaagttgatacggcataaacagttgttgggcgcagagatcggccgccagcagtaacagcgccccgcatagcgccgcctgggttagcccccagcgagcggtgccgctaatgcgtcgggcaatgtgcggtgcgactaaagcaataaaggaaatcggcccggcaagcgctgttgccgcagcggtaagcaccactgcaaccagcatcattaacagacgcgaacgttcgacgctgacgcccagcgcacacgcggtatcatcgcccatttccagcaagcgcatccggcgtaccagtaaggcggcggcaatgagcatcaatataatgatgggtgcggaaggcgaggtttttgcccacgtcaggccgttgagcgatccggcattccacaaacctgctgttagcgccgtttctaaagacgctttcagcaacagccaggtattaaaggccaccagcatggcgcgaacgccgataccgataataatcaaccgaaaggtgtcgatgccgttgcgccaggcgagcagccagaccagcagcgaagtgacaatgccgcccaccattgctgacagcgcgatagccgtcaggtcctgaccaaacagcaccatcgccaccagcacgccgctccacgccccggtgttaaagcccattacgtcagggctgccgagcgggttacgcatcagcgactgaaaaatcgcgccactgacgcccagtgctgcgccaatcaacagcgccatcagcacgcgtggtaaacgccattcggtgaccaccatcgtcatactgcgcggcgcatcgcccatcagcgcggcgaatacctgcgaggtttccagcgtgacggcaccgctgcgtaatccccagatacctgcaaccacacaggcggaaaccagcagcaaacaggtgatgagtaatcggcgagagacgtaaatcatgcaccacctcgcgttttacgtcgcacgaggaagatcagcaccggtgcaccaataaacgcactgaccacagaaacgcgcagttcgccgggcacaatcacccgcccgatgatatcggcaaacagcagcagggcaggggtagcaagtagcgtgacgggcagcgaccagcgatgatcggcacccaccagccaacgcgccatatgcggcatcatcaggccaataaaggcaatcgggccaactattgccgtcgcactaccacaaagcacggtaatcgccagcagaccaatcaactgtgtgcgcgccacgcgactgcccagcgccgtcgcggtgtcgctgccgaggctcaaactgttcagcgcgcgactcagtaatagcgcagttgctccggcgatcagcaccgggatcagcaccacttttaaggtatgtagattgcgaatatccagcgaaccggcttgccagaaacgcaactgatcgtagacgtcaggattaagcagggcgatgccgctggtcagtccttccagcaccgccgccagcgccacgcccgccagggttaaacgcaccggacttaactgcccgccgccctgactgccggtaaaggcaacaatcaatgaggccaccagcgccccggcgaaggccatcgccagttgttcctgcgcggaagagtaaccaaacagcgccgcacccagcacaatggcaaagctggctccggcgttcacgccaagcaagccggggtcggcaagtgggtttcgggtgagggtttgcattaacgccccggcaaggccaagcgcgccgcctgccagtaaaccggcaagggtacgcggcagccgcgcgtcgagcacgatggtgcagtcggcgctctggcaggtgccggagaaggcctccagcactacggaagcggggagtgattttgccccaatgagcaggcttaatgccgtcgcgataatcagtaataacagcaatccgggcacggcaatggcgcgtgtcacggcaacagaaccagacatacgaacttccatgataatgaaattaattatcgttatcgatcttatttggatatgttagcatgtgcagcctaagaataggtatttaaaatatttgatggcaaggcattgtaatgaataaacaatcctggctgcttaacctcagcctgttgaaaacgcacccggcgtttcgcgcagtattcctcgctcgtttcatctcaattgtgtctctgggtttgctcggcgtcgcggtgccggtgcagatccagatgatgacacattccacctggcaggtggggctttcggtgacgctgaccggcggcgcgatgtttgttggcctgatggtcggcggtgtgctggcggatcgctatgagcgcaaaaaagtgattttgctggcgcgcggcacctgtggcattggcttcattggactgtgccttaatgcactgctgccggagccgtcattgctggcaatctatttacttggtttatgggatggttttttcgcatcgcttggcgttacggcgctattggcggcgacaccagcactggtagggcgtgaaaacttaatgcaggccggggcgatcaccatgttgaccgtgcgtctggggtcggtgatttcgcccatgattggcggtttattgctggcgaccggtggcgtagcctggaactacgggctggcggcggcgggcacgtttattaccttgctaccgttgttaagccttccggcgttgccaccgccaccgcagccgcgtgagcatccgttgaaatcattactggcaggatttcgttttctgcttgccagcccgctggtgggcgggattgcgctgctgggtggtttattgacgatggcgagcgcggtgcgggtactgtatccggcgctggctgacaactggcagatgtcagcggcacagattggttttctctacgcggcgatcccgctcggcgcggctattggtgcgttaaccagcgggaagctggcacatagtgcgcgaccagggttattgatgctgctctccacgctgggatcgttcctcgccattggtctgtttggcctgatgccgatgtggattttaggcgtggtttgtctggcgctgttcggctggttgagtgcggtcagctcgttgctgcaatacacaatgctgcaaacgcaaaccccggaagcgatgttagggcggattaacggtttgtggacggcgcagaacgtgacgggcgatgccataggcgcggcgctgctgggtggtttgggcgcgatgatgacaccggttgcttccgcaagcgcgagcggttttggtttgttgattatcggcgtgttgttattgctggtgctggtggagttgcgacattttcgccagacgccgccgcaggtgacagcgtccgacagttaatgcttaaaacagcgccttaagcctatccagcacttgcatggcgctgtagtaatccagacggaacgtctcggttcccagcgcataaacctgcttgttttgtactgcaggcaggtgcgcgagcagcggattagcataaatagcatcggcatctttctgatcaccggcgaacaggaatagtgactcgccatttaaccctgcagccagattttccccaccaagctgaatgatgtcatggcgtttaccctgactttggctggcatttaaccctgcgggtaacttcgccagcgtaaagccgagttgttccagcatctgcccttgtgctgattctggcgtccagagattggcactgtgtgcagcggcagtatagacaatggcagtgaccggctgcggcggtaatttgatttgctctttcgccgccgccagttgcttatcaaactgcgcaatccgctctgccgcttgtttctcatgcccggtaatttcgccaagttgcgttaacagcgactgccagcttttgtcgtcgtaattgatgattaatgtcggggcgatggtggaaagctgatcatacagtgccagcgccgaatccccgccggttgcgctaattaaaatcagatccggcatttgcgcggcaacggcttcggcgctcggttcgccgatatagagccgttgcagtttgcgttctttcgccaccttgctccactggcgtaaaaagccctggtcatccgcgacgcggttattcggcgtggtcgcgccgctggcgatcaccggagcatcaatcgccagcagtgagccggtcagggtgacgctggtggaaacaatacgctgcggctggctttccagtgtatgtgtgccacggctgtcagtaatctgacgcggccagtcagcggcctgaactgcggctattcctgaaagcaaaagtcctgttaatagaagggcgttgcggtagagcggggcgagtctcacaaatcagcttcctgttattaataaggttaagggcgtaatgacaaattcgacaaagcgcacaatccgtcccctcgcccctttggggagagggttagggtgaggggaacagccagcactggtgcgaacattaaccctcaccccagccctcaccctggaagggagagggggcagaacggcgcaggacatcacattgcgcttatgcgaatccatcaataatgcttctcattttcattgtaaccacaaccagatgcaaccccgagttgcagattgcgttacctcaagagttgacatagtgcgcgtttgcttttaggttagcgaccgaaaatataaatgataatcattattaaagcctttatcattttgtggaggatgatatggatacgtcactggctgaggaagtacagcagaccatggcaacacttgcgcccaatcgctttttctttatgtcgccgtaccgcagttttacgacgtcaggatgtttcgcccgcttcgatgaaccggctgtgaacggggattcgcccgacagtcccttccagcaaaaactcgccgcgctgtttgccgatgccaaagcgcagggcatcaaaaatccggtgatggtcggggcgattcccttcgatccacgtcagccttcgtcgctgtatattcctgaatcctggcagtcgttctcccgtcaggaaaaacaagcttccgcacgccgtttcacccgcagccagtcgctgaatgtggtggaacgccaggcaattccggagcaaaccacgtttgaacagatggttgcccgcgccgccgcacttaccgccacgccgcaggtcgacaaagtggtgttgtcacggttgattgatatcaccactgacgccgccattgatagtggcgtattgctggaacggttgattgcgcaaaacccggttagttacaacttccatgttccgctggctgatggtggcgtcctgctgggggccagcccggaactgctgctacgtaaagacggcgagcgttttagctccattccgttagccggttccgcgcgtcgtcagccggatgaagtgctcgatcgcgaagcaggtaatcgtctgctggcgtcagaaaaagatcgccatgaacatgaactggtgactcaggcgatgaaagaggtactgcgcgaacgcagtagtgagttacacgttccttcttctccacagctgatcaccacgccgacgctgtggcatctcgcaactccctttgaaggtaaagcgaattcgcaagaaaacgcactgactctggcctgtctgctgcatccgacccccgcgctgagcggtttcccgcatcaggccgcgacccaggttattgctgaactggaaccgttcgaccgcgaactgtttggcggcattgtgggttggtgtgacagcgaaggtaacggcgaatgggtggtgaccatccgctgcgcgaagctgcgggaaaatcaggtgcgtctgtttgccggagcggggattgtgcctgcgtcgtcaccgttgggtgagtggcgcgaaacaggcgtcaaactttctaccatgttgaacgtttttggattgcattaaggagcgaggatgagcattccattcacccgctggccggaagagtttgcccgtcgctatcgggaaaaaggctactggcaggatttgccgctgaccgacattctgacgcgacatgctgcgagtgacagcatcgcggttatcgacggcgagcgacagttgagttatcgggagctgaatcaggcggcggataacctcgcgtgtagtttacgccgtcagggcattaaacctggtgaaaccgcgctggtacaactgggtaacgtcgctgaattgtatattacctttttcgcgctgctgaaactgggcgttgcgccggtgctggcgttgttcagccatcagcgtagtgaactgaacgcctatgccagccagattgaacccgcattgctgattgccgatcgccaacatgcgctgtttagcggggatgatttcctcaatactttcgtcacagaacattcctccattcgcgtggtgcaactgctcaacgacagcggtgagcataacttgcaggatgcgattaaccatccggctgaggattttactgccacgccatcacctgctgatgaagtggcctatttccagctttccggtggcaccaccggcacaccgaaactgatcccgcgcactcataacgactactactacagcgtgcgtcgtagcgtcgagatttgtcagttcacacaacagacacgctacctgtgcgcgatcccggcggctcataactacgccatgagttcgccaggatcgctgggcgtctttcttgccggaggaacggttgttctggcggccgatcccagcgccacgctctgtttcccattgattgaaaaacatcaggttaacgttaccgcgctggtgccacccgcagtcagcctgtggttgcaggcgctgatcgaaggcgaaagccgggcgcagcttgcctcgctgaaactgttacaggtcggcggcgcacgtctttctgccacccttgcggcgcgtattcccgctgagattggctgtcagttgcagcaggtgtttggcatggcggaagggctggtgaactacacccgacttgatgatagcgcggagaaaattatccatacccagggttacccaatgtgtccggatgacgaagtatgggttgccgatgccgaaggaaatccactgccgcaaggggaagtcggacgcctgatgacgcgcgggccgtacaccttccgcggctattacaaaagtccacagcacaatgccagcgcctttgatgccaacggtttttactgttccggcgatctgatctctattgatccagagggttacatcaccgtgcaggggcgcgagaaagatcagattaaccgtggcggcgagaagatcgctgccgaagagatcgaaaacctgctgctgcgccacccggcggtgatctacgccgcactggtgagcatggaagatgagctgatgggcgaaaaaagctgcgcttatctggtggtaaaagagccgctgcgcgcggtgcaggtgcgtcgtttcctgcgtgaacagggtattgccgaatttaaattaccggatcgcgtggagtgtgtggattcacttccgctgacggcggtcgggaaagtcgataaaaaacaattacgtcagtggctggcgtcacgcgcatcagcctgaaggagagaacacgatggctattccaaaattacaggcttacgcactgccggagtctcacgatattccgcagaataaagttgactgggcctttgaaccgcaacgtgccgcgttgttaatccatgatatgcaggactattttgtcagcttctggggcgagaactgcccgatgatggagcaggtgatcgcgaatattgctgcgctgcgcgactactgcaaacagcacaatatcccggtttattacaccgcccagccgaaagagcagagcgatgaagatcgggcgctgttgaatgatatgtgggggccgggcctgacccgctcgccggaacagcaaaaggtggtggatcgcctgacgccagatgccgacgacacggtgctggtgaagtggcgctacagcgcgtttcatcgttctccgctggagcaaatgctgaaagagagtggacgtaaccagctgattattaccggggtatatgcccacattggctgtatgaccaccgcaaccgacgcatttatgcgcgatattaaaccgtttatggtggcggatgcgctggccgatttcagccgtgacgagcatttgatgtcgctgaaatatgtggccggacgttctggccgggtggtgatgactgaagaattactgccagcacctatccccgccagcaaagcggcgctgcgtgaggtgatcctgccgttgctggacgagtccgatgaaccgttcgatgacgacaacctgatcgactacggtctggattcggtgcgcatgatggcgctggcggcgcgctggcgcaaagtgcatggtgatatcgactttgtcatgctggcgaaaaacccgaccatcgacgcctggtggaagctactctcccgcgaggtgaaataatggatttcagcggtaaaaatgtctgggtaaccggcgcaggtaaaggtatcggctacgccacggcgctggcgtttgttgaggcgggagcgaaagttacaggttttgatcaagcgttcactcaggagcaatatccctttgcgaccgaagtgatggatgttgccgacgctgcgcaggtcgcgcaagtgtgtcagcgactgttagctgaaacggagcgactggacgcgctggtcaatgcggcgggaattttacgcatgggcgcgaccgatcagctcagtaaagaggactggcagcagacttttgcggttaacgtcggcggtgcgtttaacctgttccagcaaaccatgaaccagtttcgccgtcagcggggcggggcgattgtcactgtggcgtccgacgccgcgcacacgccgcgtattggcatgagtgcttatggcgcatcgaaagcggcgctgaaaagcctggcgttgagcgtcgggctggaactggcgggtagcggcgtgcgctgtaatgtggtttcgcctggctccaccgacaccgatatgcaacgcacgctgtgggtgagcgatgacgccgaagaacagcgtattcgcggctttggcgagcagtttaaactcggcattccgctggggaaaatcgcccgtccacaagagatcgccaacacgattttgttcctcgcctctgacctcgccagccatattaccctacaggatattgtggtcgatggcggctcaacgctgggggcataagcatgatctggaaacgccatttaacgctcgacgaactgaacgccaccagcgataacacaatggtggcgcatctgggaattgtgtatacccgtctgggcgatgatgtgctggaagccgaaatgccggttgatacccgtactcatcagccgttcggtttactacatggcggcgcgtcggcggcgctggcggaaacgctgggatcgatggccggatttatgatgacccgcgacggacagtgtgtggtaggcacagaacttaatgcaacacaccatcgcccggtgtctgagggaaaggtacgcggcgtctgccagccgctgcatcttggtcggcaaaatcagagctgggaaatcgtcgttttcgatgaacaggggcggcgttgctgcacttgtcggctgggtacggcagttttgggatgaacccgacagaattagatgagattgcaggaaaactcggttaacggagtgatcgagttaacattgttaagttaaatattggtttcaactccgatttacatggttgctgtgttgttaaattgtacaaagatgttatagaaacaaaatgtaacatctctatggacacgcacacggataacaactatgaacaaatcagggaaatacctcgtctggacagtgctctctgtaatgggagcatttgctctgggatacattgctttaaatcgtggggaacagatcaacgcgctgtggattgtggtggcgtcggtctgtatctatctgatcgcttaccgtttttatgggctgtatatcgccaaaaatgtgctggcggttgacccgacgcgtatgacgccagcggtgcgccataacgacgggctggactatgtgccgacggacaagaaagtgctgttcggtcaccattttgcggccattgccggagcaggtccgctggtggggccggtactggcggcgcaaatgggctacctgccggggatgatctggctgctcgctggggtggttctcgccggtgcggtgcaggatttcatggtgctgtttgtttctacgcgccgtgacggtcgctcgctgggtgagctggtcaaagaagagatggggccaaccgccggggtgattgcgctggtggcctgctttatgatcatggtcattatccttgcagtgctggcgatgatcgtggtgaaagccctgactcatagcccgtggggaacatataccgttgcgttcaccattccgctggcgctgtttatggggatctacctgcgctatctgcgtccggggcgtattggcgaagtgtcggtcatcggtctggtattcctgattttcgccattatctctggcggctgggtggcagaaagtccgacctgggcaccgtactttgactttaccggcgtgcagttgacctggatgctggtgggttacggttttgtggcggcggtgctgccggtgtggttactgctggccccgcgtgactacctctctaccttcctgaaaatcgggactatcgtcggtctggcggtaggcattttgattatgcgcccgacgctgaccatgcctgcgctgaccaaatttgtcgatggcactggcccggtatggaccggtaacctgttcccgttcctgtttatcaccatcgcctgtggcgcggtgtctggcttccatgcgctgatctcttctgggaccacgccgaagatgctggcgaacgaagggcaggcgtgctttatcggctacggtgggatgttaatggaatccttcgtggcgattatggcgctggtttccgcctgtatcatcgatccgggcgtgtattttgccatgaacagcccgatggcggtgctggctccggcagggacggcggatgtggtcgcttctgccgcgcaggtggtgagtagctggggctttagcattacaccagatacgctaaaccagattgccagcgaagtgggtgaacagtcgatcatttcccgtgcgggcggtgcgccgacgctggcggtggggatggcctacattctgcacggcgcgctgggcggcatgatggatgtggcgttctggtatcacttcgccattttgtttgaagcactgtttattctgacggcggtggatgcaggtacgcgtgctgcgcgctttatgttgcaggatctgctgggcgtggtgtctcctggcctgaagcggaccgattcactgcctgctaacctgctggcaacagcgctgtgcgtactggcgtggggctacttcctccatcagggcgtggtcgatccgctgggcggcattaacactctgtggccgctgtttggtattgccaaccagatgctggcagggatggcgctgatgctctgtgccgtggtgttgttcaagatgaaacgtcaacgttacgcctgggtggcgctggtaccaacggcctggctgctgatttgtaccctgaccgcaggctggcagaaagcgtttagcccggatgcgaaagtcggcttcctggccattgctaataagttccaggcaatgatcgacagcggcaatattccgtcgcagtatactgagtcacagctggcgcaactggtgttcaacaaccgtctggatgccgggttaaccatcttctttatggtggtcgtggtggttctggcactgttctcgattaagacggcacttgcggcattgaaagatccgaagccaacggcgaaagaaacgccgtatgaaccaatgccggaaaatgtcgaggagatcgtggcgcaggcaaaaggcgcacactaaagtcagagtgagggggggatgttggcgaatgttggcttagtgcccagggttccctctcaccctaaccctctccccggtggggcgaggggactgaccgagcgcgttgatagcatttgtaggccggataaggcgttcacgccgcatccggcactctttcagcaacatggttagcggaggccaagatgtttgattcactggcaaaagccggaaaatatttaggtcaggcggcgaagctgatgattggtatgcctgattacgacaactatgtcgaacatatgcgggttaaccatcccgatcaaacgccgatgacctacgaagagtttttccgtgagcggcaggacgcgcgctacggtggaaaaggcggcgcgcgctgctgctaaatttgtacgtcaggctttaaacgattccacttttttgaacgctgcacgcaacgtatctggtgtcagcgtgactggcaggtaatgaatggactccaccggacgcagggtgtgggcaatcactttgtcgatctccgcctgattattgatatccacttccagctccgccagtgtagtcggcagatgaaaacgctgatacgctccagttaattgcgccagcacatcatcctgacccagcaaggcgctttgcaccagaattccgtaggcgactttggtgccgtggagaaacttctcggtttgcggcagcacggtcagaccgttatgcacggcatgagctgccgccacacgcgtaaaacgatcgcccagaccaccaaccatcccaccaccagcaataatagcatccaccacatcgcaaaatgattgcgttaactgttgattttgctgatcgctcagcgcctgttcgctactgtttaacaagacgtcgcgaatggcttgcgcattattgatccccagtcgcacggttagcggcaacgtttctggttgcggagccagcaccaccgcttcataccatttcgccagcgtgtcaccgatccccgccagcagatattgttgcggtgcattgaggataatctccggttccaccagcaccataaaattggcgtcgtcgaaaatctcataatgcagcgcctgtccggcatcattataccagacggagagcggtgtccaggcggcgcaggtggcggcgatcgtcggaacggcaacaaacggcagaccgagacggcgggcgagggctttcgcggtgtcgagcagtgcaccgccaccgacgccaatcaccacgctgcggtcgtcaccggactcagccgccagttgttgtacatcgctttcgctgcaatgaccgcgaaacaaaatatgctttgcccctggcagtccaaacgctggcggaagtttggtttgcgccgcagcaatggcgcgtttgccgtagatccacaccgcgcgagaaagttgttcatcagtgaaaaaatcgtgcaggtgattgaaacttcctggatgtgaaaagtagttagccgggccgacgaccacgcggataggattgtgaggcatgttgtgttgtccttattgttttatttagacatctaaacgtcttgattgccaaatactagcatcgtgttatagtgccttcaacacgcaacttcgtcaggtacaataaaaatgacaaataaccctctgattccacaaagcaaacttccacaacttggcaccactattttcacccagatgagcgcgctggcgcagcaacaccaggcgattaacctgtcgcaaggctttcctgattttgatggtccgcgctatttacaggagcggctggcgcaccacgttgcacagggggcaaaccaatacgcgcccatgaccggcgtgcaggccttgcgcgaggcgattgctcagaaaacggaacgtttgtatggctatcaaccagatgccgatagcgatatcaccgtaacggcaggggcgacggaagcgttatacgcggcgattaccgcactggtgcgcaatggcgatgaagtgatttgttttgatcccagctatgacagttacgcccccgccatcgcgctttctgggggaatagtgaagcgtatggcactgcaaccaccgcattttcgcgttgactggcaggaatttgccgcattattaagcgagcgcaccagactggtgatcctcaacactccgcataaccccagtgcaactgtctggcagcaggctgatttcgccgctttgtggcaggcgatcgccgggcacgagatttttgtcattagcgatgaagtctacgagcacatcaacttttcacaacagggccatgccagtgtgctggcgcatccgcagctgcgtgagcgggcagtggcggtttcttcatttggcaagacctatcatatgaccggctggaaagtgggttattgtgttgcgccagcgcccatcagcgccgaaattcgcaaggtacatcagtatctgaccttttcggtgaataccccggcacagctggcgcttgctgatatgctacgtgcagaacctgagcattatcttgcgttaccggacttttatcgccagaagcgcgatattctggtgaatgctttaaatgaaagccggctggagattttaccgtgtgaaggtacatactttttgctggtggattacagcgcggtttctaccctggatgatgttgagttttgccagtggctgacgcaggagcacggcgtagcggcgattccgctgtcggtgttttgcgccgatcccttcccacataaactgattcgtctctgttttgccaagaaggaatcgacgttgctggcagcagctgaacgcctgcgccagctttagctatttaaccgtccaggcgcgggaatattgacggtcggcaaacaactcttgcaggccgttaatttgcttcaggcgcagcacttcgtcgctgtccattcccagctctttgccaattttattatcgtcccatcccaactggctaagttcacggacgatttccgacatggcggtgatttgatggcgtccacgagcgcgattatgacgaatagtcgcggcgatgcgttgattacgcgtaccttccagacaggtcaccggcaaataaccttttaagcgtaattttaatgatgatgagcctttaccaatttcatggcggtgaaaaccatccacgatttccatggcatttttatccgtatgtgtgaccacaatgggttgggtaaaaccatctatttcaatggatttttgcagcagttttttttcgggtggtgccacgttgtttgggttgtaatcattaggcataagttggctgtttttaacccacagaacgcaatccactggctcttcacgaaaggggctaacctgatggatcgccatgcggatttcattaatcgctttgatgcgatcatcttccggcaagctggcgagaaattgcgttaaatcctgcgttaatcgttgttgcatagtatcccccattcctgacgttttccttttatccgttcgttataacgctgatagttcttcgattttgtggggctaaatgataatgcccgacaccagtaatcgttattgagtaaaactttgcatatccgccgccaggaggggatatctttcgcgccaatgtccccttgctgggtttgtggaacctcgatgccttttttctgataccagtgcaaataaatggcgattttattgcggtaatgctcagctgttttttccggcatgctattgagcagcaataatgcatattcttgccagtctaaatgttctggcttgaggattttccgatgcccatagaaatgattgtcatgtccggcgtaaatgccgccactttttaccccgctgactcgtgcgcacatagcagcccagcgatccggttcgataacgtgatagagccataatccttgtcgttgctccgggccaaaaggttcgcaaattcgcatatgacgcagaggaacgcctgcctgatacattaggttatacagtgggttgcagagactttgatgatttgcataccaggtccagatatcagccactttccagtcgtaaatggggtaaatgtaccagctatgaccgcctggtgcggccgtagtccagggtttatcgtcggcaaaacgttgtttatttaaactggcgatggcgacaaaacggttgtaggactcatccgcacggatgccgatcatcatcgccgccggacgtttttgtgaaaaccattcggcaaactcacgtacaaattgttcgaaggtcatgcctggctggtaaaagcagaaaaagtcagggtcggttatcgcatcttggggaggttgacgtacccattcgacatcaggttcccagcactgccattcgggttggtattgtgaaagggaattttgcgtcgtaagcgggagcgcaacccagtaaaactcttcgatgacatcggtgtacaactcgcgcagggactgaacatagttaatggtgcaagagaattgcgcctcccagtcgataaacaaaacgcagatttttttgcccatttgtcgggcaagttcggctgtcagatgcagcattaaaccagagtctttgccgccagaaaatgagacacaaacgcggggtagggtgttgagtgtccaggtaatacgctctcgtgcagcttccagaatattgagcggaagaggaattttataaatagacatctgaagacgctctctgaacgttacagggtgatcagtgagataagtctgttaattataaagtaaacactgtaaagcagagtgttttatttttcattcgcgctgtgaataaatagatgaaagttatagtagctgtctgtagttatatatcaaaaactctcatttagacggtcaataaatcgggagaacaccaaattatttaaagaagatttattataggaaatgtaaagctttattgaaggtaacggatgttctagttttatctcttttaagttaagaaagtcacggtaggaattataaagttcataggggactattcccagtaaatctgtaactgcaatgctattaatgattgtcagcaaagaggaaccacgaaatgagattttgcgattcataaatctctcgtctatttccatttgaatatcatcaacccctgctgatttagatattaattgggtgaactcttctgccataatttgttcataagtgctattgtcagtaattcgtggatgcctattactacaaattagagtattgcgaatcgtatgcaatggcatgcaaatgacggaacggctgatcactggcatttgggtgatcaccagatcggctttgcggtgaaccaacagttcttcagcattctctgctgacatgaggatatcatggcactcaatctcgacagaggaatcttgccgtaggcagcggatcagcatactattattagagcaagaaatgagctgagggccgtagataataaagtttttctttagttcggacttattgactatattaattgtttgttcaaggcctctgagatttttctcaagatggtgatgcagatttaaccctgttgtcgtcggcgcgataccttttcctgagcgaatgaataaagggtcattaaattgcgcacgtaagcgttgtaacgactggctcacggctgatggggtgatatatagtgattcagcagctttgctaatgcttaaatgctggtaaatacactcaaatatgacaagaagatttaagtcgaactttttcaagtcgtagagattggccatacactactccggttatatttttcttccatgatatattcacttaatcaatgttttttgcgtatatatttttattgattatgtttttttgcttaactcaggattaagtttttctaaaatagcacagccacttagggcagagcgagcaattcatgcttttttaggatggttgaaaagcagggatatagttcaaccatccatgaattaccttttatttattccccataatgatattaagcgttttctgatcgggcaaccccacggcctgttgtagcgtattttccttactcatgtaatagatagccggcgtgacatttgcccccagatcgtccatcagtttctcattgtcacttaacactttcatttgctctgtacttacgtttgcaggcacgtttagcttaagcttgccaccagaggcttcatattgttgccaggtttttgcgggatctttggaggcaagaattgccgctgctgtcgccgggctttctggcttgataaccccaaccaacaatgttcttaattgcactttgccagaatctacccacgggcgcgcctgctgccagaactgtttacaatatgggcagaacggatcggcgaagacgtagacaatgaccggcgcatcttttttaccgtcgaggagccagtgggattgttccatccgttgccacatttcgcgtccggctggtgcgtaaatttctttttcgataagtgtgttactcaggttttcacctttctcgttgtacatgtaaccagagatagcgtgcttaccatctggagtcaggtagatggtgacgcccatatcctgatactttccgagataacctttcattcctccgggggcatcgaatgttttgatgattgtaatgccctgtttttcaatcgcttttactggagcaggaagttcctctgcgaaggcgattgcaggaagcagagccagtaaaagtatcttttttaacattaatttgtccttttcagtcagtgcaaaagtcgagtaaaaggcataacctatcactgtcataggtaagagcttagatcaggtgattgccctttgtttatgagggtgttgtaatccatgtcgttgttgcatttgtaagggcaacacctcagcctgcaggcaggcactgaagataccaaagggtagttcagattacacggtcacctggaaagggggccattttactttttatcgccgctggcggtgcaaagttcacaaagttgtcttacgaaggttgtaaggtaaaacttatcgatttgataatggaaacgcattagccgaatcggcaaaaattggttaccttacatctcatcgaaaacacggaggaagtatagatgtccttgattaacaccaaaattaaaccttttaaaaaccaggcattcaaaaacggcgaattcatcgaaatcaccgaaaaagataccgaaggccgctggagcgtcttcttcttctacccggctgactttactttcgtatgcccgaccgaactgggtgacgttgctgaccactacgaagaactgcagaaactgggcgtagacgtatacgcagtatctaccgatactcacttcacccacaaagcatggcacagcagctctgaaaccatcgctaaaatcaaatatgcgatgatcggcgacccgactggcgccctgacccgtaacttcgacaacatgcgtgaagatgaaggtctggctgaccgtgcgaccttcgttgttgacccgcagggtatcatccaggcaatcgaagttaccgctgaaggcattggccgtgacgcgtctgacctgctgcgtaaaatcaaagcagcacagtacgtagcttctcacccaggtgaagtttgcccggctaaatggaaagaaggtgaagcaactctggctccgtctctggacctggttggtaaaatctaaatttccttcgtctttcacgccatagcggcgttggcgtcgcccgctcaccccggtcacttacttgtgtaagctcccggggattcacaggctagccgccttgctctgacgcgaaatacttcggaaattcacctaattcttcgggtgctgcggcacccgattttcttccccgcaccatgatgcaagctgcatccaggtagccgcagaggccgcttgcatgatgatgtttaaagcccaggagataaacatgctcgacacaaatatgaaaactcaactcaaggcttaccttgagaaattgaccaagcctgttgagttaattgccacgctggatgacagcgctaaatcggcagaaatcaaggaactgttggctgaaatcgcagaactgtcagacaaagtcacctttaaagaagataacagcttgccggtgcgtaagccgtctttcctgatcaccaacccaggttccaaccaggggccacgttttgcaggctccccgctgggccacgagttcacctcgctggtactggcgttgctgtggaccggtggtcatccgtcgaaagaagcgcagtctctgctggagcagattcgccatattgacggtgattttgaattcgaaacctattactcgctctcttgccacaactgcccggacgtggtgcaggcgctgaacctgatgagcgtactgaacccgcgcatcaagcacactgcaattgacggcggcaccttccagaacgaaatcaccgatcgcaacgtgatgggcgttccggcagtgttcgtaaacgggaaagagtttggtcagggccgcatgacgttgactgaaatcgttgccaaaattgatactggcgcggaaaaacgtgcggcagaagagctgaacaagcgtgatgcttatgacgtattaatcgtcggttccggcccggcgggtgcagcggcagcaatttactccgcacgtaaaggcatccgtaccggtctgatgggcgaacgttttggtggtcagatcctcgataccgttgatatcgaaaactacatttctgtaccgaagactgaagggcagaagctggcaggcgcactgaaagttcacgttgatgaatacgacgttgatgtgatcgacagccagagcgccagcaaactgatcccagcagcagttgaaggtggtctgcatcagattgaaacagcttctggcgcggtactgaaagcacgcagcattatcgtggcgaccggtgcaaaatggcgcaacatgaacgttccgggcgaagatcagtatcgcaccaaaggcgtgacctactgcccgcactgcgacggcccgctgtttaaaggtaaacgcgtagcggttatcggcggcggtaactccggcgtggaagcggcaattgacctggcgggtatcgttgagcacgtaacgctgctggaatttgcgccagaaatgaaagccgaccaggttctgcaggacaaactgcgcagcctgaaaaacgtcgacattattctgaatgcgcaaaccacggaagtgaaaggcgacggcagcaaagtcgttggtctggaatatcgagatcgtgtcagcggcgatattcacaacatcgaactggccggtattttcgtccagattggtctgctgccgaacaccaactggctcgaaggcgcagtcgaacgtaaccgcatgggcgagattatcattgatgcgaaatgcgaaaccaacgtgaaaggcgtgttcgcagcgggtgactgtacgacggttccgtacaagcagatcatcatcgccactggcgaaggtgccaaagcctctctgagtgcttttgactacctgattcgcaccaaaactgcataagaagaagtaagattcacctgcaattgcttagccgccggggtcaaacctggcggcttttttatggcattaaaaagccccgccgggatggctccgggcagggcgggatacttattctggcaattaacgcacaaccagcaccggcagattggcgtggcggatcacgctcgaggcgttagaacctaacagatgggtcgaaatcgatgggttgcgagaaccaataactacaacatcagcccccagttcttctgccaactcattgacttcatcccgcacgctaccaaaacggacatgttgtttaatgcgggaaggatcgatggtgaagtggctgaccatcgtttgcagacgttcttgtgcttcatgttgcagatgctcttcaaaacgacgcacatcagcggcaaaacggtgcaggctcaggctggctgacccgggtagtacgtgaagtagatgaataactccgtcatcctgggcgaggaattcagcgtggcgaacagctttgtcgctcaattccatttcaaatacatcaactggcataatgattgtcttatacataaccctttctccctgttaatcatgaacaaatcattcgccatgattataatatttatccctgatatttgtctggttctttttccttacgaactgtttctgtgatgaatatattctcactgaacaccaggaattctcccaaaacctgtggtaccgcccgttttcccgctgtgatagctacccttaaagactgactcttttttgaactgtctctggaggttgcatgaaagcattgacttatcacggcccacatcacgttcaggtagaaaatgttcccgatccgggcgttgaacaggcagatgatattattctgcgtattacggcaacggcgatctgtggctctgacctccatctttatcgaggcaaaatacctcaggttaaacatggcgatatttttggtcatgaatttatgggggaagtagttgaaaccggaaaggacgtaaaaaatttgcaaaaaggcgaccgagtggtaattccgttcgtcattgcttgtggcgactgttttttctgtcgattgcaacaatatgccgcctgcgaaaataccaatgcgggtaaaggcgctgcgctcaataaaaaacagataccagctccagcggcattgtttggttatagtcacctgtatggcggcgttcctggtgggcaggcggaatatgtccgcgtccctaaagggaatgtggggccgtttaaagtaccgcctttgctttcagatgataaagcgcttttcctttctgatattctgccaacggcatggcaggcagcaaaaaatgcgcagatccaacaaggttcaagcgttgcagtctatggtgctggtcctgtgggattgttgacaatcgcctgtgcacggttgctcggtgcggaacagatttttgttgttgatcatcatccctaccgcttgcatttcgccgccgaccgctacggcgcgatcccgattaattttgatgaagacagcgatccggcacagtcaattattgaacaaacggcaggtcaccggggcgtggatgcagtaatagacgccgtcggttttgaagcgaaaggcagcaccacggaaacggtgctgactaacctgaaactggagggcagcagcggtaaagcgttgcgtcagtgtattgcggcggtcaggcgtggcggcattgttagcgtaccgggcgtctacgctggatttattcacggtttcctgtttggcgacgcctttgataaagggttgtcgtttaaaatgggacagacccacgttcacgcatggctgggagaattattaccgttaattgagaaaggattactgaaaccagaagaaattgttacccactatatgccgtttgaagaggccgcccggggatatgagattttcgaaaaacgtgaagaggagtgccgtaaggtgattctggtacccggtgcacaaagcgcagaggcggcgcagaaggcggtttcaggtctggtgaatgcgatgccggggggaacaatatgatcgtcaggagtggttttcgaggtaaaggacagccatgacgataatcgccgccataatcagaaatcctatcaggatgtaaaatgcttctgccatggttattcccacaaacgaaacggaataattttgcagcaaaagtgaacagtgagaaccaggaaaaattgctgattttgcgtaaagaggatgcgagtgcatcctctgggcaaagcgagttatcgcttgtgcagatgggattaaagcaggtagtcgccagcagcttctggctggtattcgagttccagcacttcaaggtgggttgcaacgccgcccggaagttcccagtgaatggaatcgccaacgcgcagccccagcagtgcggcacctaccggagccataacggaaagctgagtattgctatcggtcatttttgccggatacaccagcgtgcgcacacgcacttcgccatcgctaagattgcggaatttaacccggctgttcattgtcaccacgtcgtgtggcatctcttctggcgaacacatttgggcgcgatccaactctgcgtttaacgcgtcggcgattggcaaaccagcataggcgggttgctccagcagaatatcgatgcgttcggcatccaggtcgttaatgatgatagttggtctggacatttttactccatgtcgtcggtgctgcgagtgtcgcagataaacatacccaaaagaaaaccctcaccgtcaggcggcgagggtttaactcacatgatgatactgactgttgctcactctttgaagtgatttgcgtcacattcagggaattcctcaatgcagcgcattatgtataaatcttaatcgccttggtttatggaagacgaattagcgtgttttgtaaatcagatgattaataacccgctttatcaatcacaaaggttttgccacagttacctgggtgaggttgtggcaagaatgagtttgcagaaagcggagcgttgatggcgtcagctttgatcgagatctgaatttcagtcaaatacgcagggttaccctggcacgttagcttaactgctttcacgttctcttttccccagcttttggcaaaggcggcgtcaaagtcacggcggctcactgttttaccgtaattatccgcaaggaattttccggcttcgctctctttaatttcttgattcaggcgtaccatcgtaccgaagtatgcgtccggatcaaaaccaaagcaggcaccgtgtttggcatattcgtagcgttccaggcaggaacgtccgccagctcctggcatgacttcacttagtttagcggccgtttccagtgataatccggtttccggcgatgaacacattcggctggcgcgcgcttctggtagattcgggattgggcgagtagcgcaaccgaagcgcatccagcggcgttcatcaacaccacgggcagcaaccgatttaggcaatcctggccacagaccatgtacggtcagaaaatcagctttgttggtcgtttcggtttgcaggcgacattcatctcgttcgttacgatttcgatcgtgttgactctggcaaaatccggtttgccaggagagggccaggacatagcgatcaaaatcgccatactgttttgcctgcaacgctaaggcgttggcagaagagaagggaagcagagaaaccgcgagcaacgcggcgttacgccagaatgctttcataatgggtgtggaactcatacatacactgaatactatctattaaatcataaaaaagcccgccaggtgggcttacctggcgggcgtgatgatttattcagcgtttggcgaacgtattagttccacatggcgagaatcggccagccaaccaacagcaacatagagatgtaaatcaccccgaagattgcgccaagacgccagtaatcttttgatttcacatagccacagccgtaaataatcaccccaggaccggttgcatacggcgtcagacagcccatgataccgatagacagcaccagcaggatacacagttgttccattggtacgcccggaatacctttaccgacggccagaataaccggcagcatggttgcggtgtgcgcagacaggctggcaaacaggtagtgtgcaaagtagaacaccagaaccagtacaatcaccgttgcgtttggtgagaatccttccaggtgcgtactcatggtaccggcgaaccagtcaataaaaccagaacgagtcaggccgttagccatcacaaccagagttgccaggttgaccagtgtgttccatgcgctgttatagcgggtaatgtctttccaaggcacaacgtgcagggccagcattagcgaaactgccagcagaccaaccgcagtagcattaatgacttcactgccaaatacccacaaacctaagctgagcaatacaaggccaatcagtgtccactctctgcgtgtcagcgcacccatggttttcagttcatcacccgcccaggttgccacttcttcactgtgtgtgatttccggtttgtacagcacgtaggaaagccacggcgcaatgataagcaagataaccccaaccggcaggaagcagaggaaccactgcaaccagctaatctggataccggcaattttgctgacgaactccagacccagcacgtttggtgccgcaccggtgacaaacatggacgaactcagactggtactaatgaccatcatccacatcaaatagccgccaatacgacgcgcggacggatcgttcgggaatgatttaaacaacggcggcaggtttttaatgaccggaaaaaccgtacccccggtacgcgcggtgttggaaggtgtaaacggtgccagcagaatgtcgataatgacaatcgcataacccaacgtcagcgtgcgtttgcccatgaatttcaccaggaaaagggcaatgcgacgacctaacccggaaacttcataccctaatgcaaaaataaatgcgccaaataccagccataccgtggtgctggaaaaaccagccaggccccatttcagcgcctgtttttgcgcattaaacgctgggtcagctaattctttggcatcaaagagcaggtaattactgccaataacgcaaatagtaaccgcaataaaactgatcgctgttgccggaattggctcgaggatcatgccgacaatcattgccacaaacacagcgaagtaatgccatgcctgcggcggcataccgtcggggacagggataagaaacatgacacccatcaccaccagtggggccaatagtttccatatattatcttttgctaaagacatacgggttctccgaaaattaatatttccaaatttatcaagtgcttaaataattaaatctgtgctaaaaaccaggtaaggatcagtaggtcagcactgccgcctggactgagatttcgttcgatacactccctgtcgaactgccggagataatcgagatcggcgggggttcgaatgccccctttttgcaataatgtttgcgcctcgcgctgtagccagcgcaggcccccctcgccaccgcgcgatgcaacgttggtatcgccgttgatcgccatcagtaggagcaaggtatcgagcaatgccagttcaggatctaacccctgatccagcagagtgaggtaatgcggcaaggcgtgattgatcaccagtggataacccgcttcggcttcaccgcgtgcgccggtaaggccaagctgttggtacaaccgttgacctgccgtcagttgtgaattattggtacgcagttcgcgatcggtcaggccacggcagaaacttgccgccgtagaacaaacggttgttggcgttaccggttggttgagttgaagcaaacggccaattgccgcacatagcagccctaaagaaaaaatgctgcctttatgcgtgtttacgcccgcagtggcgcggaacatatcaccttcgcaagccataccaattgggcgtaatccgtggagtaccgcttctggtgccatttccgcactacaggcaccaaattcaatgaaacggggtagccagccctgaatcgccagcgcgctgcggtggaaatcttccagcgccatatctttgtgcgcaccgcagttaatgcgatccacgaggcctggtttcggtgacagattgacttcagtcagcatggcgcgccagcccagcagggcgtactcatcgattaatgacgtcgcaagctttgtggttttagttgacgttgcaggcatcgacatcgttcagcagtgcctccatgcggttgagtaaatcggtcagttgatgggtttttccacgcgcgcagacggctgcgctttgttcgcacaacaggcagcggcgaggcggcagtgaatagtcgcggcgggagagaatttcgccttcgggcgtcaggacatcgatatcccataaccgcccgagaggatgactatgttcaagctcaatggtggcgagcttgaggtcgcgagccggggcggcaatgctcaacatgccctccggcccgctggcggaaaccagtgcagcctgctcctgaatttgccagccctgttttgcggctaaggcacgcaaggctgtcacgccatgattaaaaattcggcgtgtgacctcgctgtctttaatcggcccaggcgcaaccacggtaaaggagaccagtggaacaggatggcgcttgagccagacgtgttgccgtgcttgcctttcatcccggctgacgagcagctcgggaattgataccgcatggtggctggcgagttcaggaagcaggtgcatggcttattccttcacctgatgcacaacatcgatcaccgagccatcgcggtaacgcacaacggcaacgacgcggtctgtgaattcaatcggctgtggttcaccggtcagcagacgcgcacgttcgcgcagccactcaatggaaaccactttaatgcccgcttcctgcagacgttctgccagttccggacgtgccgggttaactgcgataccgtggtctgtgaccagaatatcgacactggagcctggggtgatgcaggtcagtacgttatccaccagagtcggaatacgaccgcgtaccagcggcgcgacgatgatggaaagcgcagaggcaatcgcggtatcgcagtgaccaccggaagcaccacgcagtacgccgtcagagccggtcagcacgttaacgttgaactgggtgtcaatttccagcgcgctcagtaccaccacgtcgagacgatcaaccgatgcgcctttcgaaccccagttagcgtactggttggcgctgatttcgatgtgattggggttacgggccagcgattgcgcagcatggctgtcaaagctctgcacatccagcagtttgcggatcagacctttttcgtgcaggtcaaccatcgtcgcggtaataccgccaagggcgaagtcggcgcgaatatcgcggctacgcattttgtcttccaggaaacgggttaccgccagcgatgcgccgccggtgccggtttgcatggagaaaccttctttgaagtagccagagttgacaatcacatccgcagcgctacgggcaataagcagttcgcgcgggttagtggtcatacgggtcgcgccagcgccgatttttgcagcatcgccaacgcggtcaactttgacgatcaaatcaacctgatcttgctcaatgcttgccggattatgcggataaggcagcagttcttcggtaagcatcacgacctgttttgcgttgtcggcatcaactattgcatagccgagggagccgcagcaggctttaccggtgtagccgttggcattaccgaattcatcacaggacgggacgccgaggaaagccacgtcgatattcagttcgccgctctgtaccagatgcacacgaccgccgtgagagtggatctgcaccggttctgccagcagaccacgggagatctcttccgccagtggaccacgcaggccggaggtataaatgcgggtaaccacgccctggcgaatgtgttctaccagcggcgcatggcaatcactcagggagctggacgccagggtcaggtttttaaagcccatcttcgcgatgacgtccatcaccatattgacggtcaggtcaccgccacggaaagcgtgatggaaggaaaccgtcatgccgtcctgtaaaccagagcgacgaatcgcttcttccaggttggcgcacagtttgcgatcgcgcgctttttcagcctggtaggtttgctttggcgagttctggaaagcggcaagatcgcattcagcgcgacgattccaggccgctacccgttcttgtcgttgagattgttcaattttctgcgtcattttgattgccttattcttcgcggatgccggaaagttctgcacgggagagcaccagacgggcgcgatcgataaccggaccgtccaccatcttgccgttcagggaaaccacgccgaggccttcgcgagcggcggcttcagcggcttctacgacgcggcgggcgtgatccacttctttctgggtcggtgcgtagaggttgtgcagcagatcaatctgacgcgggttgatcagcgatttgccgtcaaagcccagctgtttgatgtgggcggcttcttgcagaaatccggcttcgttgttagcgtcggaatagacggtatcgaacgcctgaatacccgcagagcgcgcggcctgcaaaatggaacagcgtgcgaacagcagttcagttccttccggggagcgttctgtacgcaggttgcgcacatagtcttctgcaccgagggcgataccgatcaaacgctcggaagcgtgagcgatttccactgcgcgggtaatccccagcggagattcaatcgccgccagcaggccggtgctgccgggttcacgaccacaggctttttcgatacgcaggatctctttttcaatatccagaacatcctgagcggtatcggttttcggcagacgcacaacgtccgcaccaccgcgaacgacggcttccaggtcgttaacaccccattcggaatccagcgcgttgacacgcacaatggtttcaatatcgcgatacagcggatgttgcagcgcgtggtaaaccatgcggcgggcggtgtctttttcacgcaatgctacggagtcttcgaggtcaaacatcagggcatcagccgggtagatgaaggagttgctgaccatcgcggcattggcaccaggcacaaacaacatgctgcggcgggtgcgagttttacgttgttgcagcgaagcggaaatcattggcaatcctcccatggcagagccgggataccgctggcgcgtgccagcagggcttccagtcgtgcacgtaaaatgcagtccagtgcgcctttgtcatcgacattcagctgtacgccgcgcacgttgtagcgggcgagaacgtccagaatggtggtgcgaattgcatcgccaaactgtttctcaacgctgctattgatttgcaggtcgatatcctgcgtatcgagtggggcgatgcgtatcatcacatccccagactcaagggtgcctgcaacggcgggctggtttattttcatttttcacctgtttctcatgcgggggtcttttgacgagctgccgcgtcctggcgggagtgctcaagcaggttctgcaaataatgcagcgtgactgcagggaccagcggcgcgatagccgtgagatcgtttttcgccagcagttgacgtacccgggaagcggatatcggcatctcctggtaacgcagccgctcaatttcaaccagttcgatgggcggtgcggagatagtcggcgtttccagccagtagcgcatatcctggttgtactgggcggtaacgcgacaaaagggttcagtaccgacaaagcggtgagttacacccagcgcgggagcgaggtactgacggaaaatcttcagatcaatttcggtgtaacaatggttaatgacgctctgttctttaatgaagtagcaagggaacgtagcgcgggagatgatgtattcggagccacgatgcacagtcaggcgtggaatatcggcggtgccttttaacaccaaatccagccggtcttcataggggaagcgtgaagaatcttctttgactaaaaacagatgcaaccagtcgcactgtgccgcagcctgttgaatcagataacggtgaccattcgtaaagggattggcgttcatcacaatgcagccaatcttgttccctggatgacgaaattttttcagcgattcggcatagcgtttcagtcgcgtggcgctgttttccatcagcaccatcacgccgggtacgctggtcagcgtggaaaaaccgcactggcggaacagcgcctcgtattcggttttggtataaataaacagatgcgtgctgtgccgctcataggcgaggtttatcaattcagtggctaatgtcagcgccagtccttcaccgcggacggattcactgatagcaacgcatttaataatatttccggcaattccaccgcacgcgataagcttttcatcgcgggttacggtaataaatacttcgactgtggtgtcaacgctcaaatcattttcatgcaggaattgggcgatttccgccatttttttattttctgaacgttttacgcgggtgaaaatatcattgccgaacataataaatagtatcctgaaggtgcatgttgttatcgatttgcaacgaatgttgttcaatgttgcaaactgataaccttttattttcacttgggagaaagggggtgatcgaggtatatctttttctcctttcgctatacatcctaaggagtatttcggcgtgaaattttgatttatttcacatagagttagtggttttttatttatttaatgattttaagttttttaattaatgtaattacgaaatgactcgcaggtttaagtgatttaattgatttaatgaataaaatttgccacgatcataattaatatctatgtattttgattcaacattttaattacatccgtcaaagaggctcgggacaacccgcaaggaaaacaatgttgcagcttaacgagaataaacagtttgcatttttccaaagactggcatttccgctgcgtatctttttgctgattctggtgttctcaatatttgtcattgcagccctggcgcaatattttacggccagttttgaggactatttaacgcttcatgtacgcgacatggcaatgaatcaggcgaaaattattgcctccaatgacagtgtcatctctgcggtgaaaacgcgtgactacaaacggctggcgaccatcgctaacaaattacaaagagataccgattttgattatgtggtgattggggaccggcactcgatccgcctttaccatcctaatccggagaaaattggttatcctatgcagttcaccaaacagggcgcgctggagaaaggggagagctacttcattaccgggaaagggtcaatggggatggcgatgcgcgccaaaacgccaatctttgatgacgatggaaaagtcatcggcgtggtgtcgattggctacctggtgagtaaaatcgatagctggcgggctgagtttttattaccgatggcaggtgtgtttgtcgtgctgttagggattctgatgttgctgtcgtggttcctggccgcgcatatccgtcggcagatgatgggcatggagccaaagcaaatcgcacgcgtggtccgtcagcaagaggcgctgtttagttcggtttatgaagggctgattgcggtggatccgcatggttacattaccgccatcaatcgtaacgcaagaaagatgctggggctgagttcccccggacggcaatggttgggtaaacccattgttgaagtggtcaggcccgccgatttctttaccgaacagattgatgaaaaacgtcaggatgtggtggcgaactttaacggtctgagcgttattgccaaccgggaagctattcgttcaggtgatgatttgctgggggccattatcagctttcgtagtaaagacgaaatttccaccctcaatgcgcaactgacgcaaataaaacaatacgttgagagccttcgtacattgcgacacgagcatctcaattggatgtcgacgctcaatggtctgttgcagatgaaagagtatgatcgcgtgctggcgatggtgcagggggagtctcaggcccagcaacagcttattgacagcctgcgcgaggcgtttgccgatcgccaggtggcggggctgctttttggtaaagtgcagcgcgcccgggaactggggctaaaaatgatcattgtccccggtagccagctttcgcaactgccgccaggactggatagcaccgagtttgcagccattgtgggcaatttacttgataacgccttcgaagccagcctgcgtagcgatgaaggaaacaagatcgttgaattattcctcagcgatgaaggcgatgatgtggtgattgaagtcgccgatcagggctgcggcgttccagagtctctacgagacaaaatatttgagcagggggtcagtacgcgtgctgacgagcccggtgaacatggcattgggttgtacttgattgccagctacgtaacgcgctgcggtggtgttatcactctcgaagataatgatccctgcggtaccttattttcaatctatattccgaaagtgaaacctaatgacagctccattaaccctattgatcgttgaggacgaaacgccgctggcagagatgcatgcggaatatattcgtcacattcccggattcagtcagatattactggcgggaaatctggcgcaggcccgaatgatgatcgagcgttttaagccggggctaatcttgctcgataactatcttcctgacggtagagggattaatttactgcatgaactggtgcaggcgcattatcccggcgacgtggtgtttaccactgcagccagcgatatggaaacggtgtctgaagccgtacgttgtggtgtatttgattatctcattaagcccattgcctatgaacggctggggcaaacgctaacccgtttccgccagcgtaaacatatgctggaaagtattgatagcgccagccagaagcaaattgatgagatgtttaatgcttatgctcgcggtgaacctaaggacgagctaccgaccggcattgaccccttgacgctaaacgcggtgcgaaaactgtttaaagagcctggtgtgcaacatacggcagaaacggtggcgcaggcactgaccatcagccgcaccactgccaggcgttatcttgaatattgcgccagccgccatctgattattgctgaaattgttcacggcaaagttggcagaccacaacgcatataccacagtgggtgacatgataaagccggaggaaacttgcctccggcattactatttacttgcctgtgaccgctgctgccgttcctggcaccatcagctctgtagcaacgataacaatcaccaaaccaacaagcaccggtaccgaggtgcgttttacgacttcaaacggcgagatcttcgccatcccggcaaccgcaacgactacgccagaaacgggcgaaagggtacggccaaggtttgacgcctgcagcatcgggatagtcaaatacgccgggttaatgccggaagagtgcgccagtttcgggatcatctcaacaaacgcataaaacggcgcattgcctgaaccggtcgtgactgccgccagcattgtcagaatcaccaataccagcatcaggatgatactcgccgaaccaaacgaggtagcgatagaaatcagactttgaataaagccgatggtgctaagcccctgagcgaataccccagcggcaaccagcagcatcaccacgttagcaaacgcatctgccatcccgcgataagccacttccagaccagagaaaactttctgggtattaaagctgcggaggaactccagaatggaggcaatcagcatacaaatcaccagaatagtgatgatgtgtaattgcggaccccatttaccgtcaaaaatcagtacaccgatgatcggcgtgaacggcaaaatggcataaaacgcaggagcagtggtggtgatttcactgacatctaacatttcatgagagatgtgctcttttttatccagataacgttgccagaagaagtgggcgatcgccatgccgataattgcagcaattgagataggcagcgtcgttttgaaggcgaagtcaatcagcgacatttcggaagcttgcgccgccagcaccacatcccctgaagtcggtgcgagaataatcgccgccggggaggcacaaatggcagcagctgcgccacgactgataccaacgtttaccatcaccggaaatagggttgccatcagcaaaacacccagaccggttgcggaagagacggccagagacatcagacaggcgacaaaataggcggcaatcatcagcaggtaaggggagttaatatactgcaatggttttgacgccagcttgaccaccatatcattcgcgccgatatgggtcatgtaagcggcaaatccacacagcatcataatcatcatgccgaggtcgccgccgcggctcattagtaatattttaacgtattcaacgatatccgtggcgctgtagcctgttgaagcctggctggacggtaacactttgtgccccataatggcactgataatcagcaataacaggccaccgacaaataacacaccagtggcggaataccctttaatgatgtagcgagctacacccacaataaccacaaccccaataaggagctcaatgaatgtcagcataatttttcctgtctccaggccccaaagtaaataataaaaaattcctaaagcttaaggaaaaaatatgcccaataaattggcgatgaatgctgattaaaatcaagaaaaactgccattaagacattgaagttgctgtttttatacatagataacaaaacgcatatttagcggttggcaattatcacataataatgtgtgcaaattgatggtggattgatgcaaatttgttaattgcaatggtgttagctgcggctgtgcgctcaaaaaataatctaatatgagcataggttgacgatatatattatatacttcgttaagatgattgttgtatctcgttaaaaaataaaataatttttccttgattgcattttgtcatcaaaaaagacttggtttttcttttttgactattcccatcgcagaaaacgacgcatcatctttaatcgatgcgcggaaatatttaacttgaacaagcggaaataaatagagcagctattcagattattctttatgttgggtctattaaggttatgttaattgtagctttgctatgctagtagtagatttttgataaatgttttatggtcacaaatgaacgtgagtaaatatgtcgctatcttttcctttgtttttattcagttaatcagcgttggtaaagtttttgctaacgcagatgagtggatgacaacgtttagagaaaatattgcacaaacctggcaacagcctgaacattatgatttatatattcctgccatcacctggcatgcacgtttcgcttacgacaaagaaaaaaccgatcgctataacgagcgaccgtggggtggcggttttggcctgtcgcgttgggatgaaaaaggaaactggcatggcctgtatgccatggcatttaaggactcgtggaacaaatgggaaccgattgccggatacggatgggaaagtacctggcgaccgctggcggatgaaaattttcatttaggtctgggattcaccgctggcgtaacggcacgcgataactggaattacatccctctcccggttctactgccattggcctccgtgggttatggcccagtgacttttcagatgacctacattccgggtacctacaacaatggcaatgtgtactttgcctggatgcgctttcagttttgagacaaatgaagttttagtaacttctttaaaatcaatagctaaaataagtaacatcaaaaataacgcgacttttatcactttttagtaaagttacactggacaaagcgtaccacaattggtgtactggtaaccgacacagcatttgtgtctatttttcatgtaaaggtaattttgatgtctaagattaaaggtaacgttaagtggtttaatgagtccaaaggattcggtttcattactccggaagacggcagcaaagacgtgttcgtacacttctctgcaatccagactaatggttttaaaactcttgctgaaggtcagcgcgtagagttcgaaatcactaacggtgccaaaggcccttctgctgcaaacgtaatcgctctgtaagatacgtcagcaagaattcaaaacccgcttaatcagcgggttttttttggtctttagtgtgcggttgaggccgaaaacagccagaatgccagtgcggtcatggcaaaagaccccagaaggttgacgaaaacgttcagtaatgcccagccaaagcggccctcttgtaacaaaaacaccacttctgccgaaaatgttgagaaggttgttagaccgccacaaaatccggtggtgattaatactttccacactggatcaatgttcgtcatcctgctgaaccatgcgaatcctattcctatgatgaatgccccaatcaggtttgctgtcagcgtccccaacggaatcgcctgatgcagtgggttaaatcgcatacttaacagccatctcgccacgcttcccgtaccaccgccaataaaaactgctaaaagaagttgtaacactgcaaaatcctgctatttgatttgtatgagtgataagtgtaacgccgaataatcgtcgttggcgaattttacgactctgacaggaggtggcaatgctggttgccgcaggacagtttgctgttacatctgtgtgggaaaagaacgctgagatttgtgcctcgttgatggcgcaggcggcggaaaacgacgcatcgctgtttgccctgccggaagcattgctggcgcgcgatgatcatgatgcagatctatcggttaaatcagcacagctgctggaaggcgaattcctcggactttacggcgagaaagtaaacgtaacatgatgacgacaattctgacgattcatgttccttcaacgccggggcgcgcatggaatatgctggtggcacttcaggcaggaaacatcgtcgcccgttatgccaaactgcatctctatgatgcatttgccattcaggaatcacgccgtgttgatgctggtaatgaaatcgctccgttactggaggtggaagggatgaaggtcggtctgatgacctgttatgacttacgctttccagagctggcgctggcacaggcattacagggagctgaaatcctggtacttcctgccgcctgggttcgcgggccgctcaaagagcatcactggtcaacgttgcttgccgctcgtgcgctggataccacctgttatatggtggcggcgggggagtgcgggaacaaaaatatcggtcaaagccggattatagatccctttggcgtcaccattgcggcagcgtcagaaatgcctgcactcattatggcggaagtgacgcccgaacgtgtgcgtcaggtgcgcgcgcaactgcccgtcttaaacaaccgtcgctttgcgccgccgcaattattatgatgtttttttactcggcgcttgattcaccttgttacagattgctattgtgtgcgcgcgtcgaatgaccgttaatattctctggtttttaaggcgcgttctgttgccggttatatgtcaagaaggtatctatgggtgagattagtattaccaaactgctggtagttgcggcgctggtcgttctgctgtttgggactaagaagttacgtacgctgggcggagaccttggagcggccattaaagggttcaagaaggcgatgaatgatgacgatgctgcggcgaaaaaaggcgcagacgttgatcttcaggctgaaaagctctctcataaagagtgacgtggcgagcaggacgctccctcaatatcttgttcgatacaaaaaacccgcttcaaaaagcgggttttttatcagacagatgtaagtaattattacaggattacttaacttccatccctttcgcctgcaaatcggcgtggtaagaagagcggacaaacggaccgcatgcagcatgggtaaagcccatcgccagcgcttcggctttcatttcgtcgaactcatccgggctaacgtaacgttgaaccggcaggtgatggcggcttggctgcaaatattgccccagcgttaacatcgtcacaccatgacggcgcaggtcgcgcattacctcaataatttcttcattggtttcacccagtcccaccatcagaccagacttggtcgggatttccggatgcgcttctttaaagcgttccagcagcttcagcgaccagttgtaatctgcaccaggccgtacctgacggtaaatacgcggtacgttttccaggttatggttgaacacatctggtggcgttgcagtcagaatatccagagcacgatccatacgaccgcggaaatccggcaccagagtttcaattttgatttgcgggcttttttcccgaatggcagtaatgcaatccgcaaagtgctgggcaccgccatcgcgcaggtcatcacggtcaacggaggtgataaccacataacgcagcgccatatcggcaatggtctgcgccagtttcactggttcattggcatcaggagctaccgggcgaccgtgggcaacatcacagaacggacaacggcgggtacaaatagcgccgaggatcataaacgttgctgtgccgtggttgaagcattccgccaggttagggcaggaggcttcctcgcagacagaatgcaggccatttttgcgcattgcggctttgatgccctggatacgtgtagagtccgctggaagcttgattttcatccattccggcttgcgcagcagggcttcgcgctctgttgccacgtttttaaccgggataagggccatcttatcggcatcgcggtatttaacaccgcgttccatcacaatgggtttactcatagcgtgcgtgttccagttgcgaattacgaaggaaagcgtttcaattcaatagattgttgtaattatcaactatttttgaattaacgactggcagtatatcattgaaacggacctgaaagcagccaaagcggtcgcgaaaatgtaaaattgttgttggattgtgccattttatcgttctgcgctgtgatctggctgtaacaatactttttcaaaatgcattacggataacatctattactccgtgcaggatgggatcacgcaggctgaatttgttgtagtggatagagaaatctatttgctcctcatttaaggacggaaaaggcagtttttccagcggccagcagcggctaaacaggttataaaaacggctgggaataatcgctaacatgtcactgttggcaaccagtgcagcgattgtcaaaatgttgtagctggtgaaattgatttgccggtccggaaacatttcttgaactctctgccgcagaccgctgaaattttgctcttccggtaacagaagtacatgcgcagcgttgtcgatagtctctctgtcatcttctaaagagagtagtggatttccctcgcggcaaattaacaccatattgtcggtgaacagaacatgatgttgcaccgtacgattggtgcaaaacatgttatcgatgatgagatcggtttgaaactgactgagttggttttccgcgtcgctgatgggcgggttgcgcagtaaaagctgcggatagtgagttttaatcgcccgatagatgacaggaaggaccagtgctccgaccgagggagtggtcgcaatagttatcgttcgttgcttatcatagcttccttcgatatccagcgcgccaagaatggactcaaggccctgactgatatactcatgtagatgcatcgcaaatgcggtaggagtgacaccctggcctttgcgaataaacaatgggtcagggaatataacgcgcagtttctgaatagactgactgattgccgagggggtcagattaagcactttcgctgcattaacgatccctttatgtacatatacagcttcaaaaatagtcagaaggttaagatcaatatttcgtaaggttgtaaatatttgtggtttaccttctgacgactttctgcttaaacagggttcaatttgattattactatccacgcacttactccaattttattcatggaaaaataatatttaaaaaattacaataatcttatgtctaattggaacggaacgcttttgctcaccataatcaactatttcaataggttaatcaatggggtgagttacggagcaaggcgtggcaccgcatttctgcaagtgataaagaaaatatacaaacgcgaaggagatgtaaagcattagcagatattatgagtaatgacccagtgtaaattgggccattgatgtatggaattaagcggtaatatattcgaagtccggattgtttagtagcgctaaaatattttccagtaaacgtggagcaatattattagtcgtcgcttcgggtttccattgtgatattttagccatttccattccggcatacccacaaggattaatacgtaaaaatggtgaaagatccatattgacgtttaatgccagaccgtggaatgaacaaccgcgtcgaatacgtaaacccagtgagcaaattttcttttccccaacatagacacctggcgcgtcagcccgaggatgcgcttctatacccagttcagccagggtattcaccactgtttgctcaagcaaggtcaccagttcacgcacaccgagtttacggcgtttcaggttaagcaacacatacatcacctgttgccccggcccgtgataagtcacctgcccaccgcgatcgctctggatcaccggaatatcacccggcattaaaatgtgctccgcttttcctgcctgaccttgggtgaataccggatagtgctcgaccagccagatttcatcaagggtactatcatcgcgggtatcggtgaattcatgcatagcctgggagattggctcgtaaggctgaagaccgagctggcggacaagaattttatcctgatacaaaacggcatctccgtggagaatgagtaaaagtgggggaaaagtatatcacagcgaggagaggggagttacccgaccaggagccgggtaacggagaagcgagttacagaaccatgcggacaatatcgattttgcccagttcttcatacagtgtttcaacctgctcgatatgagtggcgttgatagtgatagataccgagtggtagttgcctttgctgcttggttttaccgttggggtgtagtcacctggcgcatggcgctgtaccacttcaaccacctgatcaaccagctcaggtaacgcctgccccataactttgtaagtaaaaggagtagggaattcaagcagttcgttaagtttggttttcatgtcagctccggcgtaacgtaattaaatagcaactcccgccagaaggcgggagttttttactgatgcttagtatatggggacggaaattacactttcaagtgtttaatttttaaccaaaccagtgatggaacattaatttaatgtaatcaatgattttgccgaagaagttaccttccgggatttcttgcaacacaaccagcgggcgttgctcgatcgttttgccatcaagctggaagttgatagttccgacgacctgattcttttgcagcggcgcatgcaattcactgctgttcagcacatagctggctttcagatctttcatgcgaccacgcggaatggtcaggtacacgtctttatcaacccctaacgaagcgcgatcagaatcaccaaaccaaaccggttcagaggcgaactctttacctactttcagtgggttaacggtttcaaagaaacggaagccccaggttagcagttttttactttcggcttcacggcctttaaaagtacgtccgcccattaccgcagaaatcaagcgcatctggccttcagtcgcagaagcaacaaggttgtaacctgctttgtcagtgtgtccggttttgatgccgtcgacattcaggctgttatcccataacaggccgttacggttcagctggcgaataccgttaaacgtaaattctttttctttatagatcgagtattcattcggtacgtcacggatcaatgcctggccgatcagcgccatatctcgcgcggagctgtactgaccatcagcatccagaccatgtaccgtctggaagtgggtatttttcaggcccagtgcgttaacgtagctgttcatcaagccaacaaaagcgtcctggctaccagcggcaaaatcggccatggcgacacaagcatcgttacccgattgcaggttaataccgcggatcagctgagaaaccggaacctgcatgcccggtttgaggaacatcagcgaagaacctttaaacaccgggttaccggtggcccatgcgtcgttgccgatagtgactaaatcagtttctttaaatttaccggctttcattgcctggccgataacgtaactggtcatcattttggtcaggctggcaggatcgcggcggacatctgcgttctgttcggcgagcactttgccggagttatagtcaatcaggatgtaggactccgcatcgatctgcggtacacccgggatcatagttttgatattcaggtcatcggcatgtgcagcagagataaaggctgtgcaaagagccgtggtgagcgccaggcgcttcatgatacgagcggaaaaaatggtattcatggtctgaactacgacatccgtgatggaattaaaaaagtgccctactatagcaaatgcactaccggcaggcatctgactttccgcgtgactttgttaacgtcatttacagaaattgacacatcagatgcctgctttacgctactgcgcggtagtaataaatgactgtaattgggcttcggtttgcaaacgttgctgcaaggtactggcttcggctttgctggcgaatgggccaagctggatccgccagaccgcgccattttgagttacgcgaccggggacgccgaacttctgtcccagttgctgttggtactgttgcgcacgagcctgatcgcttacggccccgacttgcaccataaagttgccgctggcgctttgcgagacggcttgcggtgtcaccattgcaggcgaggttgcaggcgttgtcgacggagctgtaacaacgggctgtggcgcaggcgtcggttcgctgccttccagtacaccaggcgctaaggtcgttggtgcgccgaggaaaccgctactggttaccggcgcgccggtcggatcttcgctttttagcgtcgaattactgaccggaagaatgtcaccctgcgggccagacactgaacttgttcccgcgccaccgcttaaatcgggaggtgcaggcagggcgtaagtctgtttggcgactgtggtacaagccataccaggaccagaaagcgaaccatcctgggcaacaataatcggatcgatacgaactttggtgttgtttgacgtgttaagacggtcagctgccgcgcgagaaagtgaaataacgcggtcgttgccgtaagggccgcgatcattaatgcgcaccacgatcattcgcccgttagccaggttagtgattctggcgtagctggggatcggaagcgttggatgggctgccgtcagctgtgtcggatcgaatgcttcgccagaggccgtcaggttactgccgggttcggcatcatagattgccgccagtcccgcctggctaaatcgagacggatcctgcacgattttgtagcttttaccgtcgcgctggtaatcctgatttgccgtcgcgttcagtggttcgaaacgcgggtccgccccgctaatttcaactatagggccgttacataccgcaggctgcggtacacttaccgtctgttgctgaccatcatcgcttgtacatgccgcgagcattcctgccgcgatgcagatcccgagccactgcttacgcattgcgcacctcttacacgcttttcgacaacattttcctgtgggtgtggattgacattacaatcccgaacccagccatcagcacaattagcgccgatcctccataactgaccagtgggagcggaacccctacaaccggcagaataccgcttaccataccaatatttacgaagacataaacgaataatatcagcattaagccgccagccatgacgcgaccaaaggtggtttgcgctctggcggctatccacagcccgcgcatgatcagcagaatgtagagagcgagcagaatcagaatgcccactaatcccagctcttccgccagtaccgcgaagataaagtcagtatggcgttcggggagaaattcaagctgtgactgagtgccgtgcagccagcctttgccgcgtaatccgccggagccaatagcaattttagactgaataatgtgatagcccgcgccgagtgggtctgattccgggtccaggagcatcattacgcgctggcgctggtaatcatgcatcaggaagaaccacagaatcggaatgaacgccgctaccagcactactgcgacgccaatcagacgccagctaaggccagagaggaacagtacaaacagaccggaaagcgcaacgaggattgatgttcccaggtcaggctgtgcagccaccagcagcgtgggcataaatatcagcaccagcgcgatgccagtgttcttcaacgatggcgggcaaacgtcgcggttgataaagcgcgcaaccatcagtggtacggctattttggcaatttccgacggctgaaaacgaacaataccgaggtccagccagcgttgagcacctttagagatggcaccgaaagcatctaccgccaccagcaaaataatacagatgatatagagatagggggcccagccttcataaacgcgtggaggaatttgcgccatcaccaccatgatgaccagacccatcgcgatttggccgattttacgctccatcatgccaatatcctgaccgctggcgctccagataaccagggcgctgtaaaccagcaatgccagtaagatcagcagcattgtgggatcgagatggactttatcccagaatgtttttttattcggattatccgtcatgattaatggtcctccgctgcggcaaccgctggattttccgcaggcagatcggtgttgttatcacccagcataatgtggtcgaggatctggcgcatcagtgtaccaaccgccggacccgcaccaccgttctccagaatcatggcgacagccacttgcggattgttgtatggcgcaaaggcggtcatcagtttgtggtcacgtaaacgctcggcaattttgtgcgcattataggtttcgttcgctttcagaccgaagacctgagcggtaccggatttcgccgcaattttgtacggtgcgctagcaaagtatttatgcgccgtaccgttagggcggttagcaacaccgtacataccgtctttcgccagctcccagtaaccggaatgaatatcgccgacgggcggttcatgcggctgtacccatggcacctgtttgccgtcttcggcggtgctcatcagcaaatgaggaaccttcacgataccgtcattaatcaggatcatcagtgccttactcatctggattggggtcgctgtccagtaaccctgaccgataccaaccggaatggtgtcaccctgataccacggttttttaaagcgtttctgtttccattcgcgggtaggcatgttgccggaacgttcttccgccaggtcgataccggtgtaatgaccataaccgaatttacccatccattcggagaggcgatcgatccccatatcgtaggccacctgatagaagaaggtatccgcagattcttccagcgatcttgtgacattcagacgcccgtggccccattttttccagtcacgataacgtttttccgaacctggcagttgccaccagcctgggtcaaacagcgtcgtattgcgcgtgatcaccccggcgctcaatgccgaaaccgccacatagggtttaactgtagacgcgggaggataaaccccctgtgtggcgcggttcaccagcggtgtattcggatcgttcaacaaggcggaataatctttgctggagataccgtcaacaaacaagtttgggtcataactaggcgtggaaaccagcgccagcaccccacctgtacgcggatcggtgactaccacagctgcgcggctacccgccagcagcgtttcaatatattgctggagtttgagatccagcgtcaggtaaatatcgtgtccggcttgcggtggtacttcttttaactggcgaataacacgcccacggttgttaacttcaacctcttcataaccggtctgaccgtgcagcacatcttcatagtaacgctcaatgcccagcttaccgatatcatgcgttgccgcatagttggccagtttgccgtcattattcaggcgttcgacgtctttatcgttgattttcgacacatagccgatgacgtgggtcaacgccgaaccgtaaggatagtaacgacgtttatagcctttaacttcgacacccggaaaacggtactgattgacggcaaagcgagctacttgtacttcggtcaggttagttttcaccggaatagaggtgaaacggtgtgaacgtgcgcgctcttttcggaatgcagcaatatcgtcatcggtcagatctaccacgctgcgcaaagcgtccagcgtttgctgcacgttatcgactttctccggcatcatttctatctggtagatagtgcggttgagggccagagggataccgttacgatcgtagataatgccgcggctgggcgcgataggcaccagcttaatgcggttttcattagagcgggtctggtagtcggtaaagcgaacaatttgcagattatacaggttggcgataagcacgccggtcagcagcaaaatccccaaaaaggcgaccagcgcccggcgcacaaacagcgcggactctgccgtatagtcgcgaaaagagttctgtagtttcatccgctgcgttttctactcaaagctcccttatcactcacggtgataaggatggttggtggtgatgctccacgcccggtacagactctctgcgaccagcacgcgaaccagcggatgggggagggtaagcgccgacagcgaccagctctgctcagccgccgctttacaggcaggcgacaacccttcaggcccgccaatcagtagactgacgtcgcgaccatccagcttccagcgttccagctcagcggctaactgcggcgtatcccagggcttgcctggaatatcgagggtgacaatgcggtttttgcctgcggccgccaacatctgctcaccctctttgtcgagtatgcgcttgatgtccgcattcttgccgcgttttccggccggaatttcaatcagctcgaagggcatatctttcggaaaacgacgcaggtactcggtaaaaccggtttgtacccagtccggcattttcgttcccacggcgacaagttgcagcttcacgcattaactccagagtttttccagttcatacaggcgacggctctcttcctgcatgacatggacaatcacatcgcccaaatccacgacaatccagtcggcgctgttttcaccttctacgccgagcggtaacaggcccgctgcgcgagactcctgcacaacgtggtcagcaatggacataacatgacggctggacgtacccgtacagatgatcatgcagtcggtgatgctggatttgccctgaacgtctaaggcgatgatgtcctgacctttgaggtcatcaattttgtcgataacaaaatcctggagtgctttaccctgcaagttttccccctgggtgaatcaaatagataaaaatggtctgtcagtatacctgaaccagaggcgatttcgggacaattgtcgccgaatcggctttcgaaagtgggctatcatcccaccccgcgccgcagattgcatcgccatttttgtaaaacaatttctacaaagtcgtgtctggcggaaaaagtctggctgcggagaatatcagcctgcccgggtctgtcaatggtcgttgcggcttacccgtaaaaaaacagaaaagtcatgcattctcgaccccgatggcacggctattgaggacgcgtagcgtcgcgaatttttggttgatatcaatggcgctccaacacccctggtcaacgcgaaaatgccacatagcttcggcaggcatgccaattaaacgggcgattaacagactcagtacaccctgatggctgacgactaaaatattctgatagtgctgaaattcactaagccttgcgataaagcgttccacacgttgcgaaaatgcctgaaatccttcaccgttcgtggggattgcatgctgccagtcattgcaccacgcgctatagttttcggcatcttcttgcatgaggtcgcgatgatgtcgcatctcccagtcgccaaaaaacatttcgttgagttcaggtatgatttgcacggggagctggcggtcactgagaaccagtcgcgcggtatgctgtgcccgttccagttcactgcataaaaccagatcaaaggaaacaccatgtagcagcgtatgcagattttgcgcttgctcaataccgcgcgcggtcaggggggtgggcgcatgaccgctgtaaagaccatcgatattcgcttgcgtttcaccatgacgaattaaccacagtcgcatcatgccctccgtaacgacaggtatcagcgatacaagccttgttggttaatgtaagtcagtaccggttccggcaataaatcctcacatgattcaccgttttgcaaacgttcgcggatgatggtcgccgagatgttaaaccacggcgtttcagccagataaattttaccggcaggctgaaggtgaagatcttccgggttatgtgtcaaatgatcttccagccattgctggtattgcggttgcgccatttcaagtgggtaacctggacgccgacagacgatcaaatgtgcattgtcgagtatcgtttcgtattcgtaccaggtcggaaaggtcagcagtgaatcctgaccaataataaacgccagcggcacgtccggtccttgttcctgccgccactctttcagtgtttgcgcagtgtaagagggggcattgcgctttagctcgcgttcatcaagagtaaataatggcttgtcggcaatcgccagttcaagcatgtgtttacgctgcacgctgttcgcttccggctggggacgatgcggaggaacattattagggatgattgtgacccgcgtcagaccaatcaaattcgccagcgtttccacgggttttagatgaccatagtgcaccggatcaaaggtgccgccaaacagagcctgtaaagatttcatatcaaccgtcgataaatacgtccgccaggggtttatggcacaacagaagagataacccttccagctctgcccacactgactgaccgtaatcttgtttgagggtgagttccgttcgtgtcaggagttgcacggcctgacgtaactgcgtctgacttaagcgatttaacgcctcgcccatcatgccccggcggttctgccatacccgatgcttatcaaacaacgcacgcagtggcgtatgggcagactggcgtttcaggttaaccagtaacaacagttcacgttgtaatgtgcgcaacaaaataaccggttcgctgccttccagacgcagttgctgaagaatatgcaatgcgcgcttactttttcccatcaacaaagcatcaacccaatgaaaaggggtgaaatgcgcggcatcattcaccgcctgttcaacgcgcggtaatgtcaatttgccgtctggccagagcagcgataaacgctccagtgcctgagccagcgccagcaggttaccttcataacagtagcagagcacctgatttgccgcgtcatccagttctaagttgagctgttttgcgcgcgcagcaacccagcggggaagctgagcctgctccggtgtctgacaggtcacctgcacgctgcgattcgcaagcgcagtaaaccaggcggcattttcttgcgctttgcttaatttattaccgcggacgatcaacagcaggtcgtcatgcagaagtccggtgagtgtgagaagttgctcattgatcgccgcattcggtccgttttctggtaacaacagcaatagcgtttgtcgactggcaaacagactcatagcctggcataacgaaaagatcgcattccagtcagtgttgggatcaatggaaaaagtgtggtgttcttcgaatccttgtgccgcagctacctgacgaacagcgtcctggctttcctgcaataacagaggatcgttaccaagtaaaagatacgccgcgcgcagcccttcattgagctgcgcgcggagttgttccgggtacaaccgaatcatcagttacccagcgtggtggagacgcgtgcaggcgttgccggagtatccgttgtggtcgacgtctgttcttcgtcggaacgaatatccgcagcacggatgcttggcagcttacgaatcagctgttcggcagcacggtcgtacatctcttttacgatcatgtcttgttcgttatctttcgctaacgccatttgcgggttatcgaagaacgaacggaagactttggcgctaatcgggtagatatcacggccggggatcaacacggtcgcattaaccgtcatgatcatctgatactctgctgtttgaccgttacggaataccgatgcggtatctttcgcgatgctcactttacccaaacgcaaggatggaacgtccttacgcgtggtttctttatcaagcaactcgacaccattcagacgtaactggttacgcaccgcacggcttaatggcccgttcggatcgcctgagtccaggatcatgaccttcatagtggaaggaacctgcgtggtatcacgcagatgccagccacacccggcggtgattaacaccgccagagataacaacaatgttgccagatatcgcacgcttcctcccgcgcttagccaacgaccagattgaggagtttacctggtacgtaaatcactttacgtacagtaacgccatcaagatattttgctaccagatgttcctggccagcacgttcgcgaacctgttcttccgttgcgtccaccggaacggtgattttggcacggactttaccgttaacctgcaccacgaccagcgtggagtcttccaccatcgctttttcgtcagcaaccggccacggcgcgttgtcgatatcgccttcgcctttcagttcctgccacagcgtgaagcagatgtgcggggtgaacgggttaagcatacggacaacggccagcagtgcttcctgcatcagagcgcgatcctgctcgccatcggttggtgctttcgccagtttgttcatcagctccataatcgccgcaattgcggtgttgaaggtctgacgacggccgatatcatcggtcactttagcgatcgttttatgcacatcgcgacgcagcgctttctgattttcagtcagcgcatcaacgttcagtgccgcaacatcaccttttgctgtgtgctcgtaaaccagtttccagacacgtttcaggaagcggttagccccttccacaccggattcctgccattcgagagtcatatcagccggagaagcaaacatcataaacagacgaacggtgtccgcgccgtaacgttcaaccatcacctgcgggtcgataccgttgttcttcgacttggacattttgctcatgccggtataaaccagttcatggcctgccgcatctttcgctttcacgatacggcctttctcgtcacgttcaacgatagcatcaaccggggaaacccagttacgttcgccgttttcgccaacatagtagaaggcatctgccagcaccataccctgacacagcaactgtttcgctggttcgtcagagttcaccatgcctgcatcacgcatcagtttgtggaagaagcggaagtagagcaggtgcataatggcgtgttcaataccaccaatgtagatatccaccggcagccagtagttagccgcttcggaatccagcataccttctttgtactgcgggcaagtgtagcgcgcatagtaccaggaggactccataaaggtgtcgaaagtgtcggtttcacgcagtgctggcataccgttaacggtagttttcgcccactccggatctgctttaatcgggctggtaatgccgtccattaccacatcttccggcaggatcaccggcagctggtcgtccggggtcggcattacggtaccgtcttccagcgtcaccatcggaatcggcgcgccccagtaacgctgacgggaaacaccccagtcgcgcaggcggtagttcactttacgctcgccaacgcccatcgcagtcagtttatcggcgatggcgttgaaggccgcttcatggtcaagaccgttgaactcgccagagttgaacagcacgcctttttcagtcagggcttgctgagaaagatctggctcagagccgtcagctgccaggataaccggtttgatgttcaggccgtatttagaggcaaactcgtagtcgcgctggtcgtgccccggtaccgccataactgcgcccgtgccgtactccatcaatacgaagtttgctgcccaaacgggaatttcttcgcccgttaatgggtgaaccgctttaaagccagtatcgacgccttttttctccatcgtcgccatttcagcttcggcaactttggtgttacggcattcgtcaataaaggccgccagttcaggattattttccgccgctttctgcgccagcggatgacccgcagctaccgccaggtaggtacaacccataaaggtgtccgggcgggtagtgtaaacggtcagcgtgttgtcatagtcgttaacgttgaaggtgatctccacgccttcggaacgaccgatccagttacgctgcatggttttaacggtgtctggccagtgatccagtttatccagatcgttgagcagctcgtcagcgtaagcagtgattttgataaaccactgcgggatctctttacgttcaactttggtatcgcagcgccagcagcagccgtcgataacttgttcgttcgccagtacggtctggtcgttcgggcaccagttgaccgcagaagtcttcttatataccaggccttttttatacagctcggtgaagaatttctgttcccaacggtagtattccggcgtacaggttgccagctcgcggctccagtcataaccaaagcccagcattttgagctggtttttcatatacgcgatgttgtcgtacgtccacggtgccggagcggtgttgtttttcaccgccgcgccttccgcaggcagaccaaacgcgtcccagccgatcggctgcaggacgtttttgcccagcatacgctggtagcgggcgatcacgtcaccgatggtgtagttacgtacgtggcccatgtgtagtcgaccagaaggatagggaagcatagacaggcagtaatacttctctttgctctcgtcttcggttacttcaaatgtgcgcttctcatcccaatgaagctgtactttggattctatctcttccgggcggtattgctcttgcatggcagccagtggtcctgttttcaatacggctacaaatgtagcgttgaggtggtttttcagatccgcatagcatagcccaaacgtccgcgtcaaaacagcctttcgcgcactcgacgttgaaatgatgcccggattattcatacattaatttacagagtttgtgggcgtattagcaaagcaaggaacaaagaacgtctattattatagtcagttaacgacccgggagatgaaacgatgaacaaggttgctcaatattaccgtgaactggttgcgtcactgagcgaacgcctgcgcaatggcgaacgtgatatcgacgcactggtggaacaggcgcgcgagcgcgtaataaaaacaggggagttaacgcgaaccgaggtcgatgagctgacgcgagctgtcagacgtgacctggaagagttcgccatgagctatgaagagagcctgaaagaagaatctgacagcgtctttatgcgggtgattaaagaaagcttgtggcaggagctggcagacatcaccgataaaacgcagcttgaatggcgcgaagttttccaggacctcaatcatcatggggtttatcacagcggagaagtggtcgggctgggaaatctggtctgcgagaaatgtcacttccatctcccgatctacacaccggaagtgctgacgctatgcccgaaatgtggtcatgaccagttccagagacgcccgtttgagccgtaatagtctgatttcgcacagcaataaagagaatatgggccgaatgaaattccccggcccttgtttttatctctacagtaaatcttcagtctcacgaatttcctgactgacatctctggttccggatgactgaactttacgatacaggtcgagagcctgtcggagatcgacaggtcttccttctccgtagtgatacataatggccaggttataccaggcagtggcgtcattgcattcagcggctttcgtaaaccattcaaaggcagcctgataatctttctcaacgccttgtccgtgtttatacatataaccgatgttgacgtaagcgccgacgctcccctgagcggcagccttcagataccagtacatcgcttgcttatagtcctggtccaccccttcgccagcgttataatcccatgcaatttgaaactgggcgtgccgattaccctgctgtgcgcttttcaaataccagaatgcggcgagtgtcttgttttgagcaacgccttttccgtcttcataaagatcggccagattgttttgcgcgtcactatggccttgtaatgcagcttgtttgtaccagaaaaatgccagcgcatagtcttttgcgactccgttgccatttctgtacatccacccaagattattttgcgcataagacattccgctctccgcggctatctgataccagacaaccgcttctttataattgggggcttctccacgatccagtgtccagccaagggcgttggaagcgaaagtatggccttgtagggcagcttttttcagccagaagatggcttgctcattatctttatgacggcttttatcctcggtatacttttgccctaaggaatactgtgcttcacaatgaccttgctcagcggccagcttcagccagtaaaaggctttttcgtcgtccggagaatcaattgcgctatcgcgattataataaaacccaacaatatattgagcctcgcaatcgcctttttcagcacgttcgataatctcatctattgataaattatcgcagcaacttgacgtgaaaatcattatcatttccttatggttgcagataaaacatattatatttttatgtgttccatttttgcgtaagccttattttatgcgtattatgtcgcgtcagaaaagtataaataaacgagcctcgcaatgcggctaatattcatttaatgaatatttaaggataaattatatggacatggagtcgcaaaaaatattgtttgcactttccactccgatggaaatacgcaatgaatgctgtttaccttcgcattcatcacccaaaatgtatttaggtacatgcttttttgacctttcttcctcatggggaattgatgaccgtgatgacctgctgcgcacaattcaccgaatgatcgataacggtcatgccgctcggttggcagggttttatcaccgctggtttcgttattcgccatgtgaatggcgtgactatcttgctgaactaaatgagcaaggtcaggcttatgcgcaatttgtcgccagcaccgccgaatgctgtggcgaagggggaatcaaagcctgggattatgtccggatgggttttttaagccgaatgggcgtacttaataactggttgagcgaagaagaaagtctatggatccagtcgcgcattcatctacgggctctacgttattatagtaactggcggcaatactttgccggttatacctttggtcggcaatattggcagtctcccgaagatgatcatctgcctttattacgcgaattcttagcgcgtaaagaatacgacgattccggcaatgatatgttttatcaattatttgccagtgatgatgcgtattaccctaccttgtcctggcaaccattggcttactattctgcatgcccggaaacgcttaaggatatgagcgacctatgaaaaattgctggaagatcctcgatatagaggaaacgactgacgtcgatattatccgccgcgcttatctggcgctgttaccgtcctttcatccagaaaccgatccgcagggttttaaacaacttcgtcaggcgtatgaggaggcgctacggattgcgcagtcgcctgctaaatctgtttggcaaccagaagaatatgaggtagcagaacatgaaattctgctcgcctttcgtgcgttacttgcctctgatagtgaacgttttctgccctccgcctggcagcgattcattcagcaattaaattattgctcgatggaggagattgatgaattacgctggtcgctgtgcacaatcgccatgaacactgcccatttatccttcgagtgcgtggtgttattagcagaaagattgcggtggttacaggaggaaaataccggggaaatagacgaagaagaactggaatcctttttatatgccattgcgaaggggaatgtttttaacttccagaccattctgcatctgcccgttgccgtgcaaaatgacaccatcgatttttaccaaatgttcgctcggatttggtcatcgcatccacaatggctgacattgtatttagcgcaacatcgcgcagtgattatccccgatgatgcaaaactgcacagaaatttactccgctggtatagcgcaggtcgcctggatatccccgaacttctggattacgcccagtcatggcgggaaactgaacctgataatgaagatgcgccttattatgaatacgcgcaacgcgtctattgtggagaaggcgaaagcctgttggcagaactttgtgactactggcgcgagtatccctccacccaggcggatgctttaatgttgcaatggtgccgtcagcatcgggtcgattattacccattactggtgatgatgattgaagcgcgtgatctggttaacgatcagggaaaaccgctactttatgtccccggcgacagcgcccgtacgcgttttcatttatacgaaatactcagcgatgaaaaactctctgcgctggggcgttcactggtcgagatggttttgcacaaaggacgtaagccgcggatctcactcacgcgtgatacagaacataccttatggccattatatctagttgccaaacaattagtgcaggcctgccaacctacagaagaatcattaatgccgattgtgagccgccttgatgcagaaaatcgttgtccactggaagcattaattattcgtcgattattaattcaggcggcgaattttaccgagaagcaaactgttgaaccggagccgcaaccgcagccaatgcccgttgacgatggtgggccaggctgtctgggcatcattaaaattattttctatatttttatctttgctggtttgatagggaaaatactccatctgttcgggtgacagtcgacgttaatgtgcgggaagcccggcaagtaatctttccgcatttttgtaatgttgtttggcggtcagttttaaccatttttgagattcataatggttaacattaatacctgagccatttctgtagatcaaacctaaagtatattgagcatgagcatacccttgttcagctgcttccttataccagagaattgctttacgggtgtcgggtttgacccccagacctttgaggtagatccaccccagtttactttgcgcgcgtggattttcctgttccgctgattgctcataccagtatctcgcctgtgtataatccagtggtttaccgtcgctaccatgaagataaaattctccaaggcgatattgcgacgttgagtgaccatgaatcgcggaaagctccgtggctgccgtggtgaatggaagactgcccggtgagcttaaataatcaaaggcataattcaccatggctttatcacgcaacgtcgttttcttgggttggctaatacaggtaattgctgcaactataaaaattgcgaatatatacattaattttttattcatgtgtgaatgcttcgattttctttttattttgaaagcgtcaagtttatactcatcaataataaaaaagtagtcagttaatgcacttaagggattattaacaaatgaataaggaagaacaatatcttctttttgcgctttctgcgcccatggaaatacttaatcagggttgcaaacccgcgcatgactcgccaaaaatgtatactgggataaaagaattcgagctctcatcatcctggggaataaataatcgtgatgatttaattcagactatttatcagatgactgatgatggtcatgccaatgatttagctggcttatatctgacatggcatcgctcttcccctgaagagtggaaagcattaattgctggtggctcggagagagggttgatttatacccaattcgttgcccaaaccgctatgtgctgtggggaagggggaatcaaagcctgggattatgttcgaatggggtttctgtcacgggtcggtgtgctcaacaagtggctgacggaagaagagagtttatggctgcaatcgcgcgtctatgtacgagctcaccattactatcacagctggatgcactatttttccgcctattcgttaggacgtctctactggcaatcttctcagtgcgaagacaacacttcgctacgcgaggcgctaaccctgtacaaatacgatagcgccgggagtcgtatgttcgaagagctggcagcgggaagcgatcgtttctatgccacgcttccctggcagccattaactgtccagtctgaatgcccggtaacgcttaaggatgtgagcgacctatgaaaacatgttggcaaatcctcgaaattgaaagcacgacgcaaatagacattatccgccaggcttatcttgctcgcttaccgttgtgtcatcccgaaaccgatccgcaagggtttaaagcattacgccaggcctatgaagaggccctgcgactggcggtaaatcctgtcgaggaagcagatgatgaagaaaaagatgctgccgctgaacatgaaatactacgtgcattcaggacattactggattcagaaagtgatcgttttcagccttccgcctggcagaaatttattcagcaattaaatacctggaacatggaggatgtcgatcaattacgctggccgctgtgtgcaatcgccatagaagcgcgatatctttcattaaattgtgcttctttgctggcagagcgtttgaactggcattcatttaatgacagcgaaggaatggatgaggaagaaagggaggcttttcttgaggccattcaggctggtgattgtttcgatttccttagccttctggaatatcccattgcgttgcagaaccagactgttgagtattacttcgcgctggaacgttgctgccgttaccatcctgactatgtcactgcgtttttggcgatggaaggtccgtggttaattcctgatgatgcaaagttacatcgcaaactgttgcgctggtacagctcggtgcaaacaggtatggcggaactcattcctgtcgctcaacagtggcaaacggaagaaccagaaagcgaagatgcccggtattacttgtgtgcacaacgtttgtactgcggcgagggggaaagcctgcttgccgatctctgcgcgtactgggaaagttacccatctacacaagctgataatttgttgttgcagtggagcaagcgtcattgcccggattatttcgcgttattagtgatggttatcgaagcgcggagcatggtagatgcgcaaggtcaaccgctgaaatatgttcctggtgagagcgcccggacgcggctgttatgggcggagattttacatagcggaaaattatcgccgttaggtcaatcgtttattgagtcgttattcttcaagcgcaaagcatgggcgtggtggaaatcgagagtcggtagcgagacagagcaagattcaccgttcctggatttgtatcgggtagcggaacaggtagtacttgaagcgtttccgaaacaagagatgctggcccgtcttaatacaaggctggaaggcggagatgctcatccattagaggccattgtcacccggatgcttttgacgaaagtgaaactcgagccggaggatgaagatgtcgatgagccaacacctgaaaatcatgaagaaaaaaatgatgagggtgaaaaaccacagagcattaccagcattatcaaaatcagtttaacggtgctggtgataggttatgctctcggcaaaatcgcgatgttgtttagctgacgatgtgttttttgcgccgatgccggatgcagcgtttacgccgcatccggcagccgtgtttatgggatctcaatggctaaataatcgctcgcccgccgccgaacttcatccacgcgggccatatcgtttgactgcaacgccgcatcaaaatcggtgatcacccggccgatctcttctcgctcgtcacccagcgcccgcgcccacaactcttccagtttggctttaaaggtgcgattgatgagcatatcgcgcggataaattttcaatgcggataaccgcgtccgactctcttcaatctgctgcgcgctcaatgttaccgggctgtggttaatcactctggacttaacgctgccgtcttccagaagcacgtcaacttcaagcaacccgttgatatcataactaaagcgaatatcaatcgactgataagccccggttttcttcaacggcacatcgaaggattccaccagaatgttgtttttaactttgtggttttctccctgatagacgttaaccgtaattgaatcctgttccgggtgcatggttgaataagtttctacacgcgacacgggcacagtggtgtttcgttcaataatcggcgagaaaatgccggaaacgccctggcggttaacttcaacgcccaacgagtaagggcaaatatcagtgaggattacctcttcaatatcttcactgcgtaagcggcaggcggcctggattgctgcgcccagcgcgacaatggtgctcggatcgtaactttgatacggtaatttgccaaacagacgcacggcgattcgctgcaccagcggcatttgtgacgcgccgccaaccagcaccagactgtcgatttgactcggcttcagacgcgcatcgcgcaacgcctgttcaatcggcactcgcaagcgattgagcagcggcaaccacaaatcttccagttcgttctcgtaaaattcgcattcccgcgtttcttcctgatactgccagcgaatgtgcaatggcgattgattgctacattttgccgcttccacacaggcgtacaaggctgccagttcactctcgttaagcgtggtcctggcgacatccgcgcgttttaaaacctcatcgaccagcatatgggtaaaatcttcgccaccaagaaagttgtcgccagcggaggcgtgaacttcaatcaccggcgtggcgtactcaagcaccgtaacgtcaaacgtgccgccaccgagatcaaacaccagcgaacgggtattttgttgggtatgcaggccatacgccatcgcagctgctgtgggttcattaattaagcgtaccgcatttaacccggctaactccgctgctaaacgggtatgcttgcgttgttcatcgctgaaataagccggaacggagatcaccacatctttaatcggacgttgcagaaattcttcggcatcttcttttaatgagcgtaataccaaagaggacagttctggcgcgttaaatgtgtcgctgcctaaccgccagttggtattactgcccattgcacgtttaaataacgctgccgttttatccggatgcgaagtacgccgtgatacagccggttttccgactaaaatatgattattttcatccatgctaattatggatggtgttaaatattcaccgaacttatttggaattaattgcgcggcaccgtctttccagacggcaattaaactattggtagtaccgagatcgataccaatggcgagttctgcattatccattgcatttatatcttgaaagaaaaagagataaacagattaagaccacccaggtaacgcgtggtgatcttaatcaatgacgtgtgttaagcgtaaaatttcagacgatcagccagtaaatcaacaaagccctgacgatcaacatcgaccattacggtggcattcggtttattgcctgtcagataataataatcaacaaccgtcataccctgggtatatttcccctgtgtttccacgccaacccagcgctcaacagaggtaaataactccggtttcaacagccaggcgatggtgcatgggtcatgcagtggtgcgccgacaaagccccatttttcgtctttatgatattcgaggaagaaatccagcagttcggcaacaatggttgaaacagggttaccaatcgcgcggaaacgctcggtgtcttcaacgtggatttgtgctttatgagtaacatccagaccggccatcaccaccgggatccctgactggaagacaatttctgccgcttccgggtcaacgtaaatattaaattcagccgcaggcgtccagttacccagccccatagcgccacccataatcacgatacgggcaattttgctatgcagttccggatggctattgagcagcaaggcaacgttagtttgcggtccggtagacacaatggtgacaggttccgcactttcacgcagcgttttcgccatcagctctaccgccgtacagttttgcggtgcgaatgtcggttccggtaatgccgggccgtcgagaccgctttcgccgtgcacattgtccgcgataatcaactcacgcattaacggttttaccgcgccgcctgctaccggaatatcggtgcgattaagcaaggtcagcatacgcagaacattgcgtaaggttttttctggtgtctggtttccggcggaagacgtaattgctttgacatcaagctctggtgaggcgagggcgagaactattgcgatagcgtcgtcatgacctgggtcgcaatctaacagaattggcagtgccattgttgctccttgttgtgtgcttctttgcgacaagggtaacgccaggatgtaacagatacgaggggcgaaacgataaagcgtgagatggcgcgcaattgggtatgcgcgccagagtgattaatgcaggattttcgcgaggaagtcttttgcgcggtccgatttcggatcatcgaagaaagcgtctttcggcgagtcttcgacaattttaccctcgtccataaagatcacccgattcgccactttacgggcaaagcccatttcgtgggtcaccaccatcatggtcattccttcgttcgccagttccaccatcacgtccagtacttcgttgatcatctccggatccagcgccgatgtcggttcgtcaaacagcatcgcaataggatccatacacaacgcgcgagcgattgccacacgctgctgctgaccgccggaaagctgcgccggaaacttattggcgtgagcagaaagcccgacacgctccagcagtttcagggctttttcacgagccggcgctttatcgcgtttaagcactttcacctgcgccagggtcaggttttcgataatcgacagatgagggaacagctcgaaatgctggaataccatcccgacgcgggaacgcagctttgccagatcggttttcttgtcgttaaccacgataccatcgacggtgatttcaccttgctgcaccggttcgaggccgttgacggttttaatcagcgttgatttgccggaaccagacgggccgcaaaccaccaccacttcgccttttttcacttcggttgagcagtcggtcagcacctgaaagtgaccataccattttgaaacatttttcagggtaatcattatgctgtccttcttttcaagtagctgaccaacaacgacgcgctaagactaataacgaaataaacaaatccggcaaacaggatcatctcaacctgcgtaccatcacgctcaccaatggttgaggcggtacggaagaaatcggccagggataacacatacaccagtgaggtatcctggaacagtacgatgccctgagtgagcagcagcggcaccatcgcgcggaacgcctgcggcagaataatcagtttcatcgactgccagtgagtcattcccaacgccagcgcggcgctcgattgaccacgagaaatactttgaataccagcacggataatctctgaatagtaggccgcttcaaacatcgaaaacgccaccatcgccgaaattaaacggatatcattttttggcgataatcccagcacgttttgcagaaaacccggcacgatcaggtaaaaccacagcaaaaccataactaaaggaatcgagcggaatacgttaacgtaggctttggcaaaccacgccacgggcgcaaagctggataaacgcatcaccgccagcatcgtgccccacaaaataccaatcactaccgccgtgacggtgattttcagggtgatcaccagcccgtcgagcagatatggcagggaagggacaatggaactccagtcaaactcgtacattatttgccccccatgttgccaggcaggcgaactttacgttcaaccagcgtcatcaccagcatgataaaagcgttaatcaacacatacgccagcgtaatggcggtaaacgactcccaggcatgggctgagtaatcgagcaatttacccgcctgcgccgccatatccaccagaccgatagtcgaggcgatggcggagtttttcaccaggttcatcatctctgaggtcatcggcgggacgataacgcgataagcattaggcagcagtacgtatcgataagcctgcggtagcgtcaggcccatcgccagcgcggcatttttttgccctcgcggcagcgactgaatcgcggcgcgtacctgttcgcaaacacgggcggcggtaaacagccccaggcagagcatggatgaaaggaaaaactgaatattgggatccagctcggccttaaaccacatgccgattttctccggcagcagctccgggatcaccagataccaggtaaagaattgcacaatcaacggcacgttgcggaacagttcgacatacaacgtacccagaccagagagaaaacggtttggaacggtacgtaaaatgccgaaaaatgaaccgacgaggaaagcgataatccaggcgcagatcgacaaagcgatcgtcacctgaaaaccactccagatccaaccaagataggtggtgttgccgaacggggcttgttgtaaaaaaataccccagttccagtctatagacataaatctactccagaaaaaagagggtagcagcgttaactgctaccctcgaagattgttacccagcgtattgcggttttcaggcccgatggggaacgaccatcaggcgtatagtctgtccgtgctacgtaacaatcgagagggctggaatttccgcccctggttcttgtaattagttcagtgccttgtcattcggttctttgaacagtgctttcatttcgtctgacagttcgaaattcatgttcaggtttttcggcggaattggatttttgaaccacttatcaaaccatttttccgcttcaccggaggtctgcacctgagcgatggtgtcatccatcagctttttgaactgcggatcatctttacgcaacatacaaccgtaggcctcctgagactgcggcttgccgacgatttcccagttgtctggtttcttcgctttcgcacgttcaccggccagcagagcgtcatccatcataaaggcaacggcacgaccgctttccagggtgcggaaagagtcaccgtgatctttggcgctgatgatgcgcatattcattttttgctcttcattcagtttgttgagcaaaacttcagaggtagtgccggaagtgacgactacggctttgtctttcaggttggcaaaatctttgatatcgccaccctttttggtcaacaggcgcgtaccgaccacgaaaatagtgtcagagaaagccgcctgtttttggcgttcgacgttgttggtggtagaaccacattcaaaatcgaaagtgccgttttgcagcagtggaatacggttttgtgaggtaatcggaatcagttttacctgcaagtccggtttgttgagtttctttttcactgcttcaacaatggcgttggagtaatcctgcgagtaacccaccactttttgctgattgtcgtaataagagaaaggcactgaagattcacggtgaccgacgacaatcacaccgtttttggcgattttgtccagagtactgcccgctgccggggcggcgtcatctgcctgtgccagtcctgcggaaagcgccagggcgaggattgctgtggcaggtttacgtaattgcatatccaactcctttatcttctgcgttaagaacgcatggatacccgttgtgagtgtttgtgttgttatcgtctgcaactttattgtgcagtgttgtgcctgttagggaaggtgcgaataagcggggaaattcttctcggctgactcagtcatttcatttcttcatgtttgagccgattttttctcccgtaaatgccttgaatcagcctatttagaccgtttcttcgccatttaaggcgttatccccagtttttagtgagatctctcccactgacgtatcatttggtccgcccgaaacaggttggccagcgtgaataacatcgccagttggttatcgtttttcagcaaccccttgtatctggctttcacgaagccgaactgtcgcttgatgatgcgaaatgggtgctccaccctggcccggatgctggctttcatgtattcgatgttgatggccgttttgttcttgcgtggatgctgtttcaaggttcttaccttgccggggcgctcggcgatcagccagtccacatccacctcggccagctcctcgcgctgtggcgccccttggtagccggcatcggctgagacaaattgctcctctccatgcagcagattacccagctgattgaggtcatgctcgttggccgcggtggtgaccaggctgtgggtcaggccactcttggcatcgacaccaatgtgggccttcatgccaaagtgccactgattgcctttcttggtctgatgcatctccggatcgcgttgctgctctttgttcttggtcgagctgggtgcctcaatgatggtggcatcgaccaaggtgccttgagtcatcatgacgcctgcttcggccagccagcgattgatggtcttgaacaattggcgggccagttgatgctgctccagcaggtggcggaaattcatgatggtggtgcggtccggcaaggcgctatccagggataaccgggcaaacagacgcatggaggcgatttcgtacagagcatcttccatcgcgccatcgctcaggttgtaccaatgctgcatgcagtgaatgcgtagcatggtttccagcggataaggtcgccggccattaccagccttggggtaaaacggctcgatgacttccaccatgttttgccatggcagaatctgctccatgcgggacaagaaaatctcttttctggtctgacggcgcttactgctgaattcactgtcggcgaaggtaagttgatgactcatgatgaaccctgttctatggctccagatgacaaacatgatctcatatcagggacttgttcgcaccttccttagtgaagtcatttttgtcaagcaggttgattttgtaatcaacgaaagtagacatatttttgttgaagtaataggttgcacctacatcaacatatttgactaagtcctgatcgccccatactccaagatccttacctttagattgcaggtaagcaacggacggacgcagaccgaaatcgaactgatattgtgcaacagcttcgaagttttgggctttattagcaacgaagtgatcagcaaatacagtcatattctgggtttcagaataggtagtggccaggtaaatgttgttagcgtcatatttcagacctgcggcccaaacttctgcatttttaccggaagcaaatacttcaggaagaactttccctgcattaacttgagtgtcggtacgatcagatttcgcataagttgcaccgataccgaatccttcgtattcataggtagcagagaaaccgaagccatcaccgttaccttcagtgtagttatcgaaatcgctacgatcgtttttgccttggtactgagcagcaaagttcagaccatcaaccagaccaaagaagtcgttgttacgataggttgcaacaccagttgcacgttgagtcatgaacacgtcggtttgagtccaagtgtcaccaccgaattctggcaggacgtcagtccacgcaccgatgtcgtatgctacaccgtagttacggccgtaatcgatggagccgtagtcaccgaatttcaggccagcgaaggcaagacgggttttatctttggaggaaccttgagattcagcgcggttgcctttgaattcatattcccactgaccgaaaccagtcagttgatcgttgatttgggtttcacctttgaagccaagacgggcataagtagtatcaccatcatctgcatcattagaggagaagtagtgcttagcattaactttcccgtacagatccagcttgttactgtctttattataaatttcagctgcctgagcagacatcgccattagtactgatgcagctacagcagaaattgccactgttaattttttcatcgtgagccctttttttgaactattattaaaaaatgatgtcactgcgcgataaatattcatctaatcaatgtgattatttcaagatgtaagttttggtttctcgtttgatttgtgaagtagatctctatttttatctgaacttttttctatcgaatcctattcatggctcttggctgaataaaaataaatctattagccaatttatattaacggctgttatttataagtgctctataatttgaaggttcaatttaaaccggctaaaaataacactggaaattattttttggttatttgttgagatttgcttatgtatttgtagtggtgttttcaatactcggtagcattctctcaaatatcatttagtggtttacgtacgtaaaaaattggttatgctgttaagagtggttacttcgtcacacagcttaaacccgccgtcgagcgggtttttccattttttgagtctcgatattagctgataacccaatacctgagttattcactgactccgagtctgttacgtttcgtagtattccctcaatttacacccgctttgtctgcgaggtggggttatgaaatccatggataagttaacaacgggtgtcgcctatggcacctcagcaggtagtgccgggtactggtttttacagctgctagataaagtcactccctcacagtgggcagcaataggtgtgctgggtagcctggtatttggcctgctgacgtacctgacaaacctttatttcaagattaaagaagataagcgcaaggctgcgagaggtgaataatgcctccatcattacgaaaagccgttgctgctgctattggtggcggagcaattgctatagcatcagtgttaatcactggcccaagtggtaacgatggtctggaaggtgtcagctacataccatacaaagatattgttggtgtatggactgtatgtcacggacacaccggaaaagacatcatgctcggtaaaacgtataccaaagcagaatgcaaagcactcttgaataaagaccttgccactgtcgccagacaaattaacccgtatatcaaagtcgatataccggaaacaacgcgcggcgctctttactcattcgtttacaacgtgggtgctggcaattttagaacatcgacgcttcttcgcaaaataaaccagggcgatatcaaaggcgcatgtgatcagctgcgtcgctggacatacgctggcggtaagcaatggaaaggcctgatgactcgtcgtgagattgagcgtgaagtctgtttgtgggggcaacagtgagcagagtaaccgcgattatatccgctctgattatctgcatcatcgtcagcctgtcatgggcggtcaatcattaccgtgataacgcaatcgcctacaaagtccagcgcgacaaaaatgccagagaactgaagctagcgaacgcggcaattactgacatgcagatgcgtcagcgtgatgttgctgcgctcgatgcaaaatacacgaaggagttagctgatgcgaaagctgaaaatgatgctctgcgtgatgatgttgccgctggtcgtcgtcggttgcacatcaaagcagtctgtcagtcagtgcgtgaagccaccacggcctccggcgtggataatgcagcctccccccgactggcagacaccgctgaacgggattatttcaccctcagagagaggctgatcactatgcaaaaacaactggaaggaacccagaagtatattaatgagcagtgcagatagagctgaccatatcgatgggcaactcatgcaattattttgagcaatacacacgcgcttccagcggagtataaatgcctaaagtaataaaaccgagcaatccatttacgaatgtttgctgggtttctgttttaacaacattttctgcgccgccacaaattttagctgcatcgacagttttcttctgcccaattccagaaacgaagaaatgatgggtgatggtttcctttggtgctactgctgtctgtttgttttgaacagtaaatgtctgttgagcacatcctgtaataagcagggccagcgcagtagcgagtagcatttttttcatggtgttattcccgatgctttttgaagttcgcagaatcgtatgtgtagaaaattaaacaaaccctaaacaatgagttgaaatttcatattgttaatatttattaatgtatgccaggtgcgatgaatcgtcattgtattcccggattaactatgtccacagccctgacggggaacttctctgcgggagtgtccgggaataattaaaaacgatgcacacagggtttagcgcgtacatgtattgtattatgccaacaccccggtgctgacacggaagaaaccggacgttatgatttagcgtggaaagatttgtgtagtgttctgaatgctctcagtaaatagtaatgaattatcaaaggtatagtaatatcttttatgttcgtggatatttgtaatccatcggaaaactcctgctttagcaagattttccctgtattgctgaaatgtgatttctcttgatttcaacctatcataggacgtttctataagatgcgtatttcttgagaatttaacatttacaacctttttaagtccttttattaacacggtgttatcgttttctaacacaatgtgaatattatctgtggctagatagtaaatataatgtgagacattgtgacgttttagttcagaataaaacaattcacagtttaaatcttttcgcacttgatcgaatatttctttaaaaatggcaacctgagccattggtaaaaccttccatgtgatacgagggcgcgtagtttgcattatcgtttttatcgcttcaatctggtctgacctctttgtgttttgttgatgatttatgtcaaatattaggaatgttttcaattaatagtattggttgcgtaacaaagtgcggtcctgctggcattctggagggaaatacaaccgacagatgtatgtaaggccaacgtgctcaaaccttcatacagaaagatttgaagtaatattttaaccgctagatgaagagcaagcgcatggagcgacaaaatgaataaagaacaatctgctgatgatccctccgtggatctgattcgtgtaaaaaatatgcttaatagcaccatttctatgagttaccctgatgttgtaattgcatgtatagaacataaggtgtctctggaagcattcagggcaattgaggcagcgttggtgaagcacgataataatatgaaggattattccctggtggttgactgatcaccataactgctaatcattcaaactacttaacctgtgacagagccaacacgcagtctgtcactgtcaggaaagtggtaaaactgcaactcaattactgcaatgccctcgtaattaagtgaatttacaatatcgtcctgttcggagggaagaacgcgggatgttcattcttcatcacttttaattgatgtatatgctctcttttctgacgttagcctccgacggcaggcttcaatgacccaggctgagaaattcccggaccctttttgctcaagagcgatgttaatttgttcaatcatttggttaggaaagcggatgttgcgggttgttgttctgcgggttctgttcttagttgacatgaggttgccccgtattcagtgtcgctgatttgtattgtctgaagttgtttttacgttaagttgatgcagatcaattaatacgatacctgcgtcataattgattatttgacgtggtttgatggcgtagatgcacgttgtgacatgtagatgataattattatcattttgtgggtcctttccggcgatccgacaggttacggggcggcgacctcgcgggttttcgctatttatgaaaattttccggtttaaggtgtttccgttcttcttcgtcgtaacttaatgtatttatttaaaataccccctgaaaagaaaggaaacgacaggtgctgaaagcgagctttttggcctctgtcgtttcctttctctgtttttgtccgtggaatgtgcaatggaagtcaacaaaaagcagctggctgacattttcggtgcgagtatccgtaccattcagaactggcaggaacagggaatgcccgttctgcgaggcggtggcaagggtaatgaggtgctttatgactctgccgccgtcataaaatggtatgccgaaagggatgctgaaattgagaacgaaaagctgcgccgggaggttgaagaactgctgcaggccagcgagacagatctccagccagggactattgagtacgaacgccatcgacttacgcgtgcgcaggccgatgcacaggagctgaaaaatgccagagactccgctgaagtggtggaaaccgcattctgtactttcgtgctgtcgcggatcgcaggtgaaattgccagtattctcgacgggatccccctgtcggtgcagcggcgttttccggaactggaaaaccgacatgttgatttcctgaaacgggatatcatcaaagccatgaacaaagcagccgcgctggatgaactgataccggggttgctgagtgaatatatcgaacagtcaggttaacaggctgcggcattttgtccgcgccgggcttcgctcactgttcaggccggagccacagaccgccgttgaatgggcggatgctaattactatctcccgaaagaatccgcataccaggaagggcgctgggaaacactgccctttcagcgggccatcatgaatgcgatgggcagcgactacatccgtgaggtgaatgtggtgaagtctgcccgtgtcggttattccaaaatgctgctgggtgtttatgcctactttatagagcataagcagcgcaacacccttattccagctggcttcgtggctgttttcaacagtgatgagtcatcgtggcatctcgttgaagatcatcggggtaaaacggtttatgacgtagcgtcaggggacgcgttatttatttctgaactcggtccgttaccggaaaatgttacctggttatcgccggaaggggagtttcagaagtggaacggtacagcctgggtgaaagatgcagaagcagaaaaactgttccggattcgggaggcggaagaaacaaaaaacagcctgatgcaggtagccagtgagcatattgcgccacttcaggatgctgtagatctggaaatcgcaacggaggaagaaacctcattgctggaagcctggaaaaaatatcgggtgttgctgaaccgtgttgatacatcaactgcacctgatattgagtggcctacgaaccctgtcagggagtaatcattgggattatgccgcagcacgtcttaagcaagaacatgctgcggttggatgctatttttttcctgaagcggaaaacattactacagtaccttgaaccttggttttaacattctcgaaatgctctgagagtatatgtgttaagccttcttcggaatcttttgtgtttgaaaagatgcctttctgattgtaaatgcgcatcagtttttgaccgaagctattgtgcacaactccatcgccaagaattgtggctccgtatagagttccatcgtcagttaaggcctgcgccgcattgcgtattacacagctttttgtagatatatttccaggcaggcagtgaagaaggtaagacatggaaatggaatcaaattgaccatgtaacgccgcgggataaggttcaaaaacatcatggctaattttatgtttaatttttgattccccagcccttgtagatgccgcgttcaggctagcttcgttcaaatccattaaagatatcagactactctcaggtacgtgagtaaggtaaaacccagttccaacaccaatatccagatggttgttacctaaatgttccagaaagtgtggaagaaggtgttcctttgtaggacatccccatgcaagccgatttgatactcccaaaacccaccagtcataaagctttagggtaagtggtgtgtaaattctagccccatcatctgtgtttttttattaatttcaccatgttatagttttatttgtgaattaaatcaattatggcaatgaattacaaggggttaaatgctgccgcagcatagcgatattgaaatagcctggtatgcttcaatacagcaggagccgaatggctggaagaccgtcaccacacagttctacatccaggaattcagtgagtatattgcgccactgcaggatgctgtagatctggaaatcgcaacggaggaagaaagatcgttgctggaagcctgaaaaaagtatcgggtgctgctaaaccgtgtggacacttccgtagcaccagatatcgagtggcttattcaaccataataaacagtatgtatatcataggttattaattgtgagttttttcggtgtgttatttgtttgtttgatgttatgcttttgcgccccaaaaggttgtttagatgtattttatcaattgattttcaatatcgtttaataaagaaaaattaagcaagctggatgttggttttttgttaattgaatggttctaataatgtttttttactgttgttgaatgtgacttgataagaaatgcaagtaaaaatgatactctttttattttaaattcaaacggttgacatatatatagcaagaggtttcaggtgcgttgtagtgagtttatgttaataaaaagcatagtaagcgttgaaaaatgtaactttgaaataagttagaataaaaaacaacatacatataataatttaatcttaaatgaaatttattaaaatttgcaaactataattttgtgtataaaaatataaatgcacatcatcctgattatgattgtgtatttaattggttgttatttgactactatcaacttgttttaattttatgataggtgcaagatggattatgtttgctccgtagttttcatctgtcaatcatttgatttaattataaacaggagagttatctcgttcaaaaaaaattcattgtttattgtaagcgacaaaattagaagggagttaccagtatgcccctctaaactaagaattgttgatatagataagaaaacatgtttatccttttttatcgacgtgaataatgagctgcctggcaaatttactcttgataagaatggctatattgctgaagaggaacctccattatcgcttgttttttctctgtttgaagggattaaaatagcagactcacactccctttggttaaaagaaagactatgtatatccttacttgccatgttcaaaaaacgcgaaagtgtaaattcatttatactaacaaatataaatacatttacctgtaaaattactggaataatcagttttaatattgagcggcaatggcatttaaaagatattgcggaattgatttatacgagtgaaagtttaataaaaaaaagattaagggatgaaggaacgtcatttactgaaatattgagagatactaggatgaggtatgcaaaaaaactcataacttcaaactcttattctatcaatgtcgtagcccagaaatgtggctataacagtacttcatatttcatatgtgcatttaaagattattatggtgtcacgccatctcattattttgagaaaataatcggcgtcacagatggaataaacaaaacaattgactgataatgtttattacaagttgtctacatgttaattataatattatacagcgttttttttgatgtgatattctggaaccattaatttgtaattgggttgctgtcgcctattttatacatactataattgatggttttctatgtgatttagttaataaccttctgggtttattttaagggttaattgttacattgaaatggctagttattccccggggcgattttcacctcggggaaattttagttggcgttcttaaaatgtgtacttaagaccagcagtagtgatgaagttatagttttctatacctgctccatttttgctgtagtctgaagtgttattattgtgatcataaagtgaagtattaccttttttattcgtaacccgattccatgcgccttcaacataaacttttgcgttaggtgtgacgtaataacctgcattgactgcaacagaatagtaattttggtctttgaccttactgcgataagtgattctttttcccgggtcatagtgttcatcgttatcagatgattccacccagccgctgtatttaaatgtgccaccgagttcaaaatcttcataacgataacttccagtcaagccaatgtagggcattttaaaacgttgtttgtagccgattgctctttctccattcgggaaggagccgatatcatctctgaatccctcctcagaactgtagatataggaaccacctctggctgtaaagctataacggctttcctgatatccggccatgagtcccaggcggtaattgggttcgttgaggagccagcctttgatattcagatcaaattcgttggcataattgagttgtgtatcagggtgtctactttcatccgtccaggttccggggttactggaatccatccagtcctgatcgaccatattgccacctcggctgccgagagttgtccagccagcagccccgatagatatctggggcatcaaatcccaattaattgcacctttaataattgcagcgttattgaatttccagtcgagttgactgacttttcggcctccttcttcggctagataaacacgctcttttgtttttccgctcagagttccaagactaatgtccgcatttatgttgtcaggagtaaacgataaagtctcggtagaagcaaaagagctgatcgcaataggggttgtcaggactattcccagaagtttcgcccgcataaaagttctccattcaatcgttttaatgattgaatatgtattttttatatctaacttaatgagtcaattacatattgctccactgtttatattttgtttagtattgaatgattatcacaatgcgctatctgtttttggtttaattatctgttattgtttcatatttcggttttactgtgtggtttttttatgcttttgtggtgcttttatctatttaagtgccatgcctttagaggcatataagcgaaaatagcatgaggtttatcctcaattactatgttttttagtacaaaaaagagggacaaaactgagacacataaggcctcgcaatggcttgcaaggctttacatgttttgaggtagtgggacgtgtgagcgcagagatggcgcggtaagttgttgacttaaaatgtcgttctaggaacttctaagtcgtgggccgcaggttcgaatcctgcagggcgcgccatttcttcctcatttatgcccgtcttatccgtttccgctttgcccttcaccacatcactttttgtcgctgtttggcgagataattcaacggtgtcaggccgtaaaacgccttaaaaacagagataaagtacgacgtgctgctatagccacataattgcgccacctgagtgatatttttgttatccatcaataacatctgtacggcgtaacgcatacgacactctgtgacaatctggctatagctggtattttcgttttttaatttctttttgagcaggctggggcttaaacatagcgaactggcgacaattcgcagattccagtaatgctgaatatcgctttgaataatgcggcagacgctgtcgcggacgctgctgcgtaagatatacatcagtagggcaataaaccgcgattgctcaagaaagttagacaatacggtaaaaagcaatgcgcgcgtcaactccgcttcgcagggtctgctgggttgctgcttgctgtggttggcggctagccggaacacttccggtgtacggctatgacaagcgataaccggggttgccagccgcgaccagggctttacacaggttaagttcttatttaaaaacaacagataatcgttgatgatgttacggttgatgtgggtgattaatacgtgatttaacgttgagagttcaatgacgttattgttgcacgcgaaggcggccaggtagtttttcggaagggtaaacgtagcatggttattgacgcttacctctacctctttttcggtcaggatcaccacgcaaggttcactgctgctcaattgcatttcgcactcctcagatatcagaaactccgctcaaaggatctatgcttcctgcatgagtgatcggcccgttcgccgataacgatcttctttctttagcacgctttttagcaattaatcttgatggaattctgatgagagcgaaagaggtaagccaggtcgtacccgacttacctggaggagatttaatactcgagaatgccgtgcgcgacgggcaaatagcgcagagagaaatagagagtgtctttaccgcaagaggaacgtttcgctaacagcgaggcaatttctgcgtccggtttcggtttcgctgtaaaggttttgcctttgccggcgacaaaaagttcataaacaacgccgctggcaggggcgggactttggcaatcggcgctggcctgtaaataacgttcacgctgttcagcggtcagtttatccacgccgctgccatcctgtacccagacattaacgccggttgctttaacgtgttccagcagttggcgatagccatcgggcgacatgtttccggcgaaaaaactactgatataaaccggttttgctgaaacatcgctaatcagccgctgcgcgttgtttaaccatgttagcaaaggctgacgggcggcttcgctgcgccagttcaggtcgtcaatttccgcgctgatgtaccagccatccggcgttatgccaggcgcggcgctccataatctggcttgctggagatcggcagccagcaggcgattaagatagctttccagcgctgcggacgactgtttctggtgcataaaaaattccggatcggcgttcagcccgacaataagcttcagaccagcctgttgcgcagctgcggcccgcttaaacaataacgtgcgctgttctggctgggtaaatgcatcgccgtaacgggtccattgcaaaacaagggtatcgaagccttgcaaacgtaactgactcatcagcccctgccactgggtatcggtaacctgactatctcggttttgtggttgccagataatacctttcatcgcaaaggaaaaagggctgaccaaaagcagtgtcagcaatacgaaaatgaacttacgcatttaccagtgcactccaatggtgagaaacgcgttgttgcgctctccgttacgttgattaatcgccttaaaggtatgttgatactcgacgccgagactgactttgtgcggccaggcgtcgtagtgcgtctcgccggtccagatattccagcggaccccgactccgccaagctgcgcgccctgagtgcctttatcacgatagccgttgtcctgaacgtgagcgtaaggctcaatagtctgtccgttagctaccttctgatgccagctgacgcgataatctgccgtccacgcctgaatatcctggcggatatattgcgccgcatcgaggtacaggttttgggcaaaccagcctgaaccgttcgggtgccattcgtcgctgtatttgccgccattaaagaatgaggcgctggcgcgcagcatggtatcggatgcgccattttggccgttcagcggcaactgctgttcgacggcgatgaaaaagatctgatcgcgcagcggcttccagcgcagaccggtgccggacatcggatttttcaccggcatcatcaccccgttttctccggtatcggcaaagacgcggctataaactgagagcaggtcgccttccagcagcatattgcgtccgatgcggtactcggcttccagttgtccgtagctacgatagcttttccctggcgctgcgccgccgacattattgttagcggtactcattgcgccggaacgcaagccgatggaagaatcgaaactgaacgtccagcggcgaccgacctcctcatgcaaacggcggaaattgaagcgttgttgattttgttctggggtcagtggggttatcagcgcctgattatcaatgtcatcaatcaccagccgggcgtagtgctgcgtcgcaggcatgtcatccagacgctggttcacgtaggccagttgtcggatcagtgccggatcgtccggaagccctttatgcgccggttcgagcatttcccgcgactgtgcgatatcaccgctatcccacaaggcgtaaccaagcgctgcctgggtgttgctattattcggttccagttccagcgcggcgcgcaaatcactcaccgcggccgggacattatgacgttggcgataaattgtcgcccgcgcaacgtaagcgttggcagaaggcgcaatattgattgagcgcgtgagatcgttcagtgcgagttccggctgaccaggaatgtaacgttgcgcatgcagccaccagtagagggcattgcttcccagtccacgtttttctgcctgttgtagccagcgatcgcgagccgcaccatttcctgccgcctgggcggtattggcagcagcaagcagatcctcattgctcatgtcgtgaagactgattttctgccaggccgccagtgcggtggcgtagtcctcaacctgatacgcctgataggctaccgcacgatgttgccaggcgctcggttgtcgttgttcggcctgaagccatgcatacaacgccacaccgggtagcgtgtcccgataacactttgccagacggttccaggcggcggcatcgtaggaaggcgacatatcgcccagcaagcgaactattgccgggcaattatctgcaatacccggcaactgactttgccactgacgttgctccgccagcggtaagggtttcgataaaatcgccaccttcgccggcgttgccaggtaaggatgactttccagcagagacgccagtcgcgccattaaagtctggctgacacgcgcatcgccctggaaaggatagcgttgcagcaataaatcggcagcttcgcgtgactgctcgttctgcatcagttgccaggttagttgatccaggcgggtaagatttgccggttcttgctgatacagcaatcgtgccagacgcagagcttcagccttgttacgggtcgccacgctgacagcataacgctcctcaagcatttcattggcggggagggtggcgagcagtttttgcgctgcgtcgtactgaccttcttttaacagcaccggtagcgtcgcgccaacaacatactggcggttgtcggcaaactgtaccgtataattcgccaacgcctgaacggggttagcgctgtatttagataacagatagagccaacttttctcttgtgcgtccgtggtaaatagtggcttattttcaatgagataatgctggaggcgtgctttttcgccacgataagccagcgcggtcgcgtaagtaatatatgactgaggatcggtgaagatcccctgtgattgcagtgccaggatccgatcgtccagctgcccggcaagaagcacgtcaaaccactgacggcgttctgccgcgcttaatgtgttctgctggcgtgcttcattgtatagcgtatctgcctgggaccattgtttcaggtagattgcccgttgcagcagatcggttcgcagcgtttttccttccggcgatgcagcaaacgtcgcatcgttcagttgcgctctggcgacaggtaactgtgccagccgcagggcattctgcccgacttcactgcgacaacgcagggtcggcgcagcatcgcacgctttttgctgggcaagcagttcttcaactgtcgtaacgcttttcacttcaaccggaatagccgccagactgcgctcaagtcgggcatctcctgggtgacgtttcagttgatcctcaagcaacagccgcgcccggtcatcatgaccaaaatggcgataggcttccgcaaggtataaagtcagcggaatattatccggcacctgctggtgtatatattcaaattcgcggatggcggttgcttcgtcgttatttttctgtgccttcagcgctttatcgagacggggataaataacaaaatggcgataatcgctcagccccagctcttctgcgctggtgccgatattgtctgcgagtgcgctggtactcaataaagacgtcagcagtaaaccagaccatccgatgacgcgattaaggttattctccttcattttcggactccagttgcgcaacctgttctgtgtttaaacctgctttgagtaatagtgattgcatcgaaacttgtaattcgcgttgaattgtcaggacgcgatccaacgtttcctggctgataacgccttcggtgaccaaaaacttgccgagcggcagagaactgcgttcatggcgcaataacaacacgttaattgctgaacgattaatatgaccgagcgtggtcagtatttcggcgaacaggaactgatgcggcacatattgccgccagatttcaccggcctgctgttccgtgagccactgatgctgaaccgcattgtacaacattgcccgcggatcgtgaccgcgtcggcgtgcataccagtgacgtaaccctgtgacaatttgtccccgcagaacaatgacgtaacgcactttgcgtccgactttacgcgtcagggccgccagcgaaaccgggtcaataccatcttcactgccgacaattaactcgtcattttccagacgcagcggcagtaccgcataatgcagcgccacggaggccggcatttcggcaatcagcgaggaagggatctgccaggcatcgatggattcccacgccacgccgttttgctctgccagcgcctgtgccagctgctcggcgctaatcagcccctgcatcagcattgaaccgcccaggcgtagaccttcgacgcgattacgcagtgctgtatcgagttgttcttcagtgatgacctgattttccagcagaatttgacctaacgggcgcaacgagcgggtatcgccagtcacgctggggaagtcatgcgttgttttatcccacgccacgcgacgtggatcgccgtgttgaagtacctgttttagcgcgcgccagttggccatgaagttaatcaggttgccccagaaaagacgcaggacggaaagcagcccctgcgtcaggccgtagtagccagtaacgaaaatcacccgctgcacgatgcggttaaccatcaaaccaaagtttagccacagcagggtcattaaccatgcgctgccgctgaaaatagaaaggaaatgccaggcatcgggccacaaactttcatacgccagcaacagcaaaagctggatcatcaccagcatcgcgaggaagctgacaaagttactgattgcccctttgcggtcgcgccagagaaagtagttcagcgtcaggctggaggtccatttatgggttttaaagccttggaaaacaatgccgatgatccagcgggatttttgtcgaaccgcagtcgaaaaggtatcggggaaatattcgcgcacgcagatcatgtttgatgtccgcgcgtgctgtaaaaatttacgctgctcgcgttctttggcttcgtccaccaccggaaaacggacaaaaatttccgtcatacctttttctttcaggcggaagccaatgtcgtaatcttcagtaagactctgcacgtcgaaagcaataccgtcaccgtcagctaacagtgcggtcacggcgcggcggctgaaacaggtgccgacgcctgcgctgggcacttgtccggcgagggcttcacgcaccggaacatctttgccatgcagctctgaaaactcatcaatgtaagtcatgctggtgaagtgcgtccattcgcgttcgaacggatacaccgggatctgaatcagatctttacgctcgaccagatagttgaacagacgcaattccatcggtgaaatcacatcttcggcgtcatgcagaataaaaccagcaaaagcgaaattggcgctacgctcaaattgggtgatggcgtccagcacgttgttcagacagtcggctttgctggtggggccaggacgcgcgcagactaccttatgcacattcgggaagcgagcgcacacttcgtcaacatcacgctgagtatcggggtcgttggggtaggtgccaacaaagatatgatagttttcgtagtcgagcgtggtcgccgccagctcggccatattgccgatgacgcccgtttcattccacgccggaaccataatcgctaacggtttttcatctggtttatacagttcgcggtaactcattcgcgggtagcggcgataaacactcaacttgcgtttaatgcggcgtacccagtagacgacatcaataaaaaaatcgtccagcccgctgatgaacatgatgaccgctaacgttatcgcgattacttttaagccgtagagccaggtagcaaaaacatcaagaagccagtccacacaaaaaccttacattaacgctggttatgtttagggtggcgtatattaaggttttttatgaattgtgacagctttttaccattaataggtatgactattgcggcacgttatttttacactggttataaaagttgccgtttgctgaaggattaagcgggtaatgtgataacaaaccttgtcccccgcgcatccgacgttaccgcaaccgtgcctttatgcgcgacaacaatcgatttcactatcgccaggccaataccgctaccttcaccttttcgctggcgggaggggtcaacgcgatagaaacggtcaaacaatcgcggtaagtgctcgggcgcaatgggcgtaccggggttttcgacgataacttgcaccaggtgatcgaccgtctgacagcgcactacaattgtctctccggttggcgtataacgcagggcgttcgaaagcaggttgcttagcgcccgacgcagcatcagcggatcgcccgcgacctgacacttgtcgccaacaaaccgcaactccacgccgcgatcttccgctaacgcctcgaaaaaatcgaacactttgccgacttcatccgccaggttgagcattttcttttcggggattagctggttgttatcggcctgagcgagaaacagcatatcgctgaccattttcgccattcgcgtcagctcttcgagattagagtagagcacatcttccagctccttctggctgcgcgactggctgagggcgatttcggtttgcgttatgagattcgtaattggtgtgcgaatttcgtgagcgatatccgctgagaaattggactggcgggtaaagacatcctcaatacgctcgatcatatggttgaacgacagtaccagctgttccagctcaatgggcacggtctgcgggtcgaggcgaacgtcgagatctttcgaggtaatattctggatttgacggctgacgctgcggatcggcgcgtgacctttatgtaccgccaacagtacgataaagacgatcaggatgctgattaccgatgcggtcataataagtttattcatcaaatcatttatgtaatgaagatgaaaatcgatcgaaagcgcgatgtagagcgtataaatcggtttgccgtccaccaacgggccaaccggcaagttaatcatccgccagttgctgtgttccatatgcccgtgaccgtggcctggcatcatcatcgtcgggccggaaaggagatacacctcgccaccctgagcgtctttatcgggtatggcgtcacgcgtaaactcgcggatatccggcgcaccgggggagtgatacaccgttttaccctgactatctgccagggaaatcaacacattggaataaccactgacgatatcttccagcgtcattaagcgtcgggcttgcgtttcgtcagggtgatttagtacccgttcaagggtggcgctaatctcttttaaatcattaatatcctgctcggcaaaatgaacttttactgagtggatcatgatccatgcaaaggcgaaaaacgccgcgatggtggccaggctgataaaaaaggtcaggcgggttgccagcgaaaacgggcgctgaaatggcttactgaccatccggcacctcaagcatgtaacccacgccgcgcacggtctgaattagcttcggctcaaagtcgttgtcgattttgccgcgcagccgcttcaccgccacatcaatagcattggtatcgctgtcaaaattcatgtcccatacctgcgaggcgataagcgagcggggcagcacttcgccctgatggcgaaggaagaactccagcagagtaaactctttactggtcaaagtgatgcgcgtgccgctgcgggtgactttgcggctgacgagatcgaccatcaaatcggcaacctgaaactgactttcgataatcaccgccgccccgcgccgcagtaatgtgcgcacccgcgccagcagttcagcaaaagcgaatggcttcaccaggtagtcatctgcccccaactccagccccttgacgcgatgttcaatggtgccaagcgcggtaagcaacagaatcggcatccctttattggcggagcgtaacatgcgcacgatatcccagccgttcacgtccggcagcataatatcgaggattatcagatcataatcaccggtcatcgccagatggtagccattcagcccgttgtcggccaaatcgaccacaaaaccggcttcggttaaccctttggtcaagtattctccggttttcttttcatcttcgacaatcaacagtttcatatttcctccgcatgttgcccgggcaattctagagtagcgggatcagatggcaatcgcttattggcaaaatgacaattttgtcatttttctgtcaccggaaaatcagagcctggcgagtaaagttggcggcataaaatcaccagaaattatgagcctatgtctccttgtaaacttctgccattttgtgtggcccttgcgctaaccggttgttcactggcaccggattatcagcgtccggcaatgcccgtgccgcagcagttctcactcagccagaacggcctggttaacgcagcagataactatcagaacgcgggctggcgcaccttttttgttgataatcaggtgaagacgctgattagcgaggcgctggtgaataatcgggatttgcgcatggcgacgctgaaagtgcaggaggcacgggcgcaatatcgtctgaccgatgccgaccgctacccacagctcaatggcgagggcagcggcagctggagcggtaatcttaaagggaataccgccacgacacgggagttttcgaccggccttaacgccagctttgacctcgattttttcggtcgcttaaagaacatgagcgaagccgagcgacaaaattatttagccactgaggaagctcagcgcgcggtgcatattctgctggtttctaatgtcgcgcaaagctatttcaatcagcaactggcgtatgcgcaattgcaaatagccgaagaaacgctgcgtaattatcagcagtcatatgcgtttgtcgaaaaacaactgttgacaggtagcagtaatgttctggcgctggaacaggctcgcggggtgatagaaagtacccgcagcgacatcgctaaacgtcagggggaactggcgcaggcgaataatgcattgcaactgttgctgggaagctacggcaagctgccgcaagcgcagacagtaaacagcgacagcctgcaaagcgttaaattaccggcgggattgtcgtcgcaaatcttattgcagcgcccggatattatggaagctgaacacgcgttaatggcggctaatgccaatattggcgctgcacgcgcggcattttttccgtctataagcctgaccagcggaatatcgaccgccagtagcgatctatcgtcattatttaacgccagcagcgggatgtggaattttatacccaaaattgagatccccatttttaatgccggacgcaaccaggccaatctggatatcgccgaaattcgccagcagcagtcggtggtgaattatgaacagaaaatccagaacgcctttaaagaagtggcagatgcgctggcattacgtcaaagcctgaacgatcaaattagcgcccagcagcgttatctggcatcgctgcaaattactttgcaacgggcgcgggcattatatcagcacggcgcagtaagttatctggaagtgctggatgccgagcgttctttatttgcaacccgacaaactttacttgatctgaattatgcccgtcaggttaacgaaatttctttgtataccgcacttggtggcggttgacagcaatatactcgtcatacttcaagttgcatgtgctgcgtctgcgttcgctcaccccagtcacttacttatgtaagctcctggggattcactcgcttgtcgccttcctgcaactcgaattatttagagtatgacttttaactccaggagagaataaatgaaaaaagcactgcaagtcgcaatgttcagtctgtttaccgttattggctttaatgcccaggctaacgaacatcatcatgaaaccatgagcgaagcacaaccacaggttattagcgccactggcgtggtaaagggtatcgatctggaaagcaaaaaaatcaccatccatcacgatccgattgctgccgtgaactggccggagatgaccatgcgctttaccatcaccccgcagacgaaaatgagtgaaattaaaaccggcgacaaagtggcgtttaattttgtccagcagggcaacctttctttattacaggatattaaagtcagccagtaacccaggtttaatgagatgaaaaaaatcgcgcttattatcggcagcatgatcgcgggcggtattatttctgcggcaggttttacctgggttgcaaaggcggaaccgcctgcagaaaaaacgtcgaccgcagaacgtaaaatcttattctggtacgacccaatgtatcccaatacgcggttcgataaaccaggtaaatcgccgtttatggatatggatctggtgccgaaatatgccgatgaagagagttctgcgtctggtgtgcgcattgacccgactcagacgcagaatctgggggtgaaaacggctaccgtcacgcgcggaccgctgacttttgcccagagtttcccggcgaatgtcagttacaacgagtatcagtatgccattgtgcaggctcgcgctgccgggtttatcgacaaggtgtatccgcttaccgtgggcgataaagtacaaaagggcacaccgcttctcgacctgaccattcctgactgggtggaagcgcagagtgagtatttactgctgcgcgaaaccggcggtacggcgacccagactgaaggcattcttgagcggctgcgactggcgggaatgccggaggcggatattcgccgcctgatcgccacgcaaaaaatccagactcgctttacgctcaaagcgcccattgatggcgtgatcaccgcgtttgatctgcgcgcgggaatgaatatcgccaaagataacgtggtagcgaaaattcagggtatggacccggtgtgggtcactgctgcgatcccggagtctatcgcctggctggtgaaagatgcctcgcagtttaccctcaccgttccggcgcgaccggataaaacactcaccatccgcaaatggacgctgctacctggcgtggatgccgcgacccgcacgctgcagctgcgtctggaagtcgacaacgccgacgaggcgctaaaaccgggcatgaacgcctggttgcaactcaacaccgccagcgaaccgatgctgctcattccgtcacaagcgctgattgataccggcagcgaacagcgggtgattaccgttgatgccgacgggcgctttgtaccgaaacgcgttgctgttttccaggcatcgcaaggcgtcaccgcattacgctctggtctggcggaaggtgaaaaggtggtttccagcggcctgttcctgattgattccgaagccaatatttctggcgcactggagcggatgcgctctgaaagtgctacccatgcgcattgagggaataaccaatgattgaatggattattcgtcgctcggtggcgaaccgttttttggtgctgatgggcgcgttgtttctgagcatctggggcacctggaccatcattaatacgccagtggatgcgctgccggatctctccgatgtgcaggttattattaaaaccagctatcccggtcaggcaccacaaatcgttgaaaatcaggtgacttatccgctaaccaccaccatgttgtcggtgcctggcgcgaagactgtgcgcggtttctcacagtttggcgactcttatgtgtatgtcattttcgaagatggcaccgatccgtactgggcgcgttcgcgggtgctggagtacctcaaccaggtacagggtaagctgcctgcgggagtcagcgccgagctggggccagatgccacgggtgttggctggatctatgaatatgcactggtggatcgcagcggtaagcacgatctggccgatttacgctcattacaggactggtttctcaaatatgagctgaaaaccatccctgacgttgcggaagtggcgtcggtgggcggtgtggtgaaagagtatcaggtggttatcgatccccagcgcctggcgcagtatggcatcagtctcgccgaagtaaaaagcgcgctggatgcttcaaaccaggaagcgggcggttcgtcgatcgaactggcggaagcggaatatatggtgcgcgccagcggctatctgcaaacgctcgacgactttaatcacatcgttttaaaagccagtgaaaatggcgtgcccgtttatctgcgcgatgttgcgaaggtccagattggcccggagatgcgccggggcattgccgaactaaacggcgaaggcgaagtggcgggcggggtggtgatcctgcgatccggcaaaaacgcccgagaagtgatcgccgccgtgaaggacaaactggaaacgctgaaaagtagtctgccggaaggcgtggagatagttacaacatacgatcgcagccagctcattgaccgcgccatcgacaacctcagcggcaagttgctggaagagtttattgtggtggcggtagtctgtgcgctgtttctctggcatgtgcgctcggcgctggtggcgattatttcgttgccgctggggttgtgtattgcttttattgtcatgcacttccagggactgaatgccaatattatgtcgttgggtggcattgcgattgccgtcggggcgatggtcgatgctgctatcgtcatgatcgagaatgcgcataaacggctggaagagtggcagcaccagcatcctgacgccacgctggataataaaacgcgctggcaggtgatcaccgatgcgtctgttgaagtggggccggcgctatttatcagtctgctgattatcacgttgtcgtttatcccgatcttcaccctggaagggcaggaagggcgtctgtttggcccgttggcgttcaccaaaacgtatgcgatggcgggtgcggcgctgctggcgatcgtagtgatcccgatcctgatgggctactggatccgtggcaaaattccgccggaaagcagtaacccgctcaatcgctttttgattcgtgtttatcatccgctgttgctgaaagtactgcactggccgaaaaccacgctgctggtggcggcgctttcggtgctgacggttctctggccgctcaataaagttggcggggaatttttaccgcagatcaatgaaggcgacttgttgtatatgccatcgacgctgccggggatttccgcagcagaggcggcgagtatgctgcaaaaaaccgacaagctaattatgagcgtacctgaagtggcgcgggtatttggcaaaaccgggaaagcggaaaccgccaccgattctgctccgctggagatggtagaaacgaccatccagcttaagccgcaggagcagtggcggccaggcatgacgatggacaaaatcattgaggaactggataacaccgtgcggctgccggggctggcgaatctgtgggtgccgccaattcgtaaccgtatcgatatgctctcaaccggcattaaaagccccatcggcattaaagtttccggcactgtgctggcggatatcgacgcgatggctgagcaaattgaagaagtagcgcgaacggtgccaggcgtagcttctgcgcttgccgagcggctggaaggtgggcgctatatcaacgttgagattaaccgtgaaaaagccgcacgttacggtatgacggtggcggatgtgcagttgtttgtgacttctgcggtgggcggggcgatggttggcgaaacggtggaagggattgcccgttatccaattaatctgcgttatccgcaaagctggcgcgatagtccgcaggcactgcgccagctgccgatcctgacgccgatgaagcagcaaatcaccctggcagacgtggccgacattaaagtctctaccggaccgtcgatgctgaaaaccgagaatgcgcgcccgacgagctggatttatatcgatgcccgcgatcgtgacatggtgtcggtggttcacgatttgcaaaaagcgatagctgaaaaagtgcagttaaaaccgggcaccagcgtggcattctccgggcagttcgagctactggagcgcgccaaccataagcttaaactcatggtgccgatgacgttgatgattatcttcgtgctgttgtatctggcgttccgtcgggtgggcgaagcgttgctgattatcagcagcgtaccgtttgcgctggtgggcggcatctggttgctgtggtggatgggctttcatctttccgtggcgacgggcactggctttatcgccctcgccggggtcgccgccgaatttggcgtggtgatgctgatgtatttacgtcacgccatagaggccgtgccgtcgttgaataatccacaaacattcagcgagcagaagctggatgaggcgttatatcacggcgcggtcctgcgcgtgcgcccgaaagcgatgacggtggcggtgattatcgccggtctgctgccgattctgtggggaacgggggctggttcagaggtgatgagccggattgccgcgccgatgattggcggcatgatcaccgcacctttgctgtcgctgtttattatcccggcggcgtataagctgatgtggctgcaccgacatcgggtacggaaataaaagcaggataccccgtttaaccgtgtggattgtgtcttgcgacgatgggcactaaatgttaaaaggtgcccctcaacaaaaaagacacacaggggaaaggcgtgaaaaacgcgtcaaccgtatcggaagatactgcgtcgaatcaagagccgacgcttcatcgcggattacataaccgtcatattcaactgattgcgttgggtggcgcaattggtactggtctgtttcttggcattggcccggcgattcagatggcgggtccggctgtattgctgggctacggcgtcgccgggatcatcgctttcctgattatgcgccagcttggcgaaatggtggttgaggagccggtatccggttcatttgcccactttgcctataaatactggggaccgtttgcgggcttcctctctggctggaactactgggtaatgttcgtgctggtgggaatggcagagctgaccgctgcgggcatctatatgcagtactggttcccggatgttccaacgtggatttgggctgccgccttctttattatcatcaacgccgttaacctggtgaacgtgcgcttatatggcgaaaccgagttctggtttgcgttgattaaagtgctggcaatcatcggtatgatcggctttggcctgtggctgctgttttctggtcacggcggcgagaaagccagtatcgacaacctctggcgctacggtggtttcttcgccaccggctggaatgggctgattttgtcgctggcggtaattatgttctccttcggcggtctggagctgattgggattactgccgctgaagcgcgcgatccggaaaaaagcattccaaaagcggtaaatcaggtggtgtatcgcatcctgctgttttacatcggttcactggtggttttactggcgctctatccgtgggtggaagtgaaatccaacagtagcccgtttgtgatgattttccataatctcgacagcaacgtggtagcttctgcgctgaacttcgtcattctggtagcatcgctgtcagtgtataacagcggggtttactctaacagccgcatgctgtttggcctttctgtgcagggtaatgcgccgaagtttttgactcgcgtcagccgtcgcggtgtgccgattaactcgctgatgctttccggagcgatcacttcgctggtggtgttaatcaactatctgctgccgcaaaaagcgtttggtctgctgatggcgctggtggtagcaacgctgctgttgaactggattatgatctgtctggcgcatctgcgttttcgtgcagcgatgcgacgtcaggggcgtgaaacacagtttaaggcgctgctctatccgttcggcaactatctctgcattgccttcctcggcatgattttgctgctgatgtgcacgatggatgatatgcgcttgtcagcgatcctgctgccggtgtggattgtattcctgtttatggcatttaaaacgctgcgtcggaaataaggcattcacgctacatccgacaaaacgatgtcaaccatccgaaaccgctctcatccattcgatgagagcggtttttttaattactgcttaaatgcacccgccagagagcgaatatcattgccggttggcgactgatgaagtcgcagaccaaactcttcgacaatcgcaaatatgtgatcgaatatatcagcctgaatgctttcatattccagccacaccacggtgttagtaaacgcgtagatctcgagcggtaaaccgttatcacctggagccagttggcgtaccattaaggtcatatctttacgaatccgcggatggttacgcagatattcgttcagataggcacgaaaggttccaatattggtcattcggcgcagatttaataccgactccgtagaaccttgctggcgattccactcattaatttcctgatggcggctggttaaataaggctttaacaaatgcgctttattcagacgttgcatttcgtcttcatcaagaaaacgaatactggtgacatcaatactgatactgcgcttaatacgtcgcccgccagatgctgacatcccgctccagtttttaaaggagtcagaaaccagagaccaggtgggaatagtggtaatggtattgtcccagttacgcactttgacggtggttaacccaatatcgatcaccgcgccatccgcgccgtatttcggcatctccagccagtcgcccagtttcagcatatcgttcgcggaaagctgaatacctgccaccagaccaagaatcggatctttaaataccaacatcagcacggcagccattgcaccaagaccgctgatcagaatcgctggcgactgaccaatcagcagcgagatcatcaaaatgccgaccagaatcgcgccgatcagtttaatcccctgaaatatccctttcagcggtaactgagatgctgccgggaatttctgcgccagattcaaaataacatccagcaacgagaagactgaaagcagcgcatacatcatgatccacaactgcgcgcaggtagtcagaatatctgccgcttcggtgcctttttgcagccagaataccgcctgaatattgacgataatcccctgcagggtaaaagctaaacggtggaagagtttattctgggtaatgatttgcaaccaaagccgtgaactggcgatggcacgtttttcgaaggtccgcagtaccacccaatgcaaaataatatgcaccacgacggcggtcagaaaaataataccgaaaatcatcaccatcgaggtggtgtgatcgatctcaatacccgctaaatcttcaacctgggatattaaatcctgcataacgtctcctttatacaacagcagcctatgatgacggctgaaacagggttatgcaaatcaggagaatctgagaggaaatagccgggcagatgcccggcaagagagaattacacttcggttaaggtgatgttttgcggcagacgagatttcggcagcgtagcgttaaaatcttcaacgctgtgatgacctaccggaacaaccaccagactggtgtagcctttctctttcagaccaaattctgcatcgaggatggcggcgtcaaaaccttcgatgggtaccgcgtccagacccagagccgccacgccgagcaggaagttaccgacgttgagataaacctgttttgccatccactctgcatcatcatgcagatctttacggtgcatatcagcgaagaacttgcgacctttatcgttcgcggctttcgcttccggcgtggcaaagcggccatcggcatcttcctggtcaacaaccagcttcagccagacatcgtccatcgcggtttttgcacagaacaccacgacgtgcgaggcatcaagcattttacgctcgttgaacacgtaattaccggcagcggatttggcaacacgcgctttaccttcttccgtgctggcaacaataaaatgccacggctgggagttggtgctggatgggctgtattgcagtagcgttttgatctgctcggcctgttccggggtaagttttttgctggcatcaaatgccttagtggaatgacgctttaaggcgacagaaatgatatccataaagactccatgtgaaagtaattttgcgtgccagcagattacaaggttcaacgagaaatggtaagcgagaaaaatgcgctatagatttccgctttagcctggacgcactcttttttgatcgcgtttagccagaccatcaaccaccagattccacgaatcgttgatcagatcgcgaagtaacgcttcggagatttcttcgccgggatacactgaaatccagtgctttttattcatgtgataccctggcttaatgcttgggtatatttgctgatttaacagggatttttgtggatcggacttcagattgataaaggggacgccgcgtagctccgacgacagcataaaaatcttgccgccaattttaaaaacatcgaactccgggccaaaaggccagcaaagctcgacaaagggtaactcaagggccaggcgtttcgccgtttcgtgcagtgattgcttatccataaacgttcctttaggcgaaggagaataagcaaagtatgccgcgaagtacggcgataatcgacgtttaatccgccagcgagaaccagcgtcgccagataaagcgcagaacaaaatactcaatagcgcccagcactaaaaaccacagacaaaacaataaagtgtaaagctgactaagatccatcagatggaacatggtcaccagtttttgtgccagcgccagccccagtgcgggggcgggcagcagcaggcaagagaggaaagccatcagcaaaatgcctgctgcggtggtcaaggtttctaaagggtgtttcataacattgttaaatgtaagttaaaacaccattgtcagggatattcttctgtaaggcaattcccggcttagtcaccggcccagatctcacaatgctttttcaccagcccaatcagcgagccgccatcggcgacgaaatcgcgcattagctgcgcttcattcagaccgctgacgacctggcgatgcagggcctcaatcgcgctcgatgcaccaattttatgtgcggaaggggcgattttttccagcaatcgcaaggtatcttccgttagcggtcgacgatctccagtgtgcggatcggtgatgacgccttcaagcccatagcgacaggcctggaaacggttgaatttatacagcaggtaatctttttcctgatgtttaaacgggcgttccgtcagtaaccagtgggcggtagcctgaattaatcccgccatatttactgcgtggctaagggttaacggggtatccatcacccgaacctccaccgtgccaaaatgaggactggggcgaatatcccagtgcagatctttaatgctgtcgatcatcgtggtgtaactcagacagcgaaacagggcttcaaattgttgccagttactgacccacggcatcgggccattatcaggaaaggcggaaaaaatattcggtcgtgaggaggcaaaacgcgtatccgttccctgcatatatggcgacgcggcggaaagggcgataaagtgcggcacaaatcgtgacaagccgtgcagcaaataaatggcgtcatcgccactggcgcagccaacatggacatgctgaccaaaaacggtcgcctgctgaatgagataaccaaagttttccagcgtgcgttgatagcgttcgttatcgcatacctcctgacgctgccatttctgaaacgggtgcgtgccaccgccgcaaatttccagatgatggtctgtggctgcctgcaatacgactttctgcatcgctgaaaactgcccggcagcctggttgatatcacggcaaacatccgtcgccagctccagcatactttcggtgatatcgtgctttacctctccggccgtgatcttatttttaaccgcgtcaatcagcattgaagagtcctggcttaagtcatagcccggcggattaaccacctgcatttccagttcaataccgagggtaaaaggttcagaaacatgaaaatcgggtaatggcataggtttctcttatgttggcgttttctattcagtatagaagtcggagcggctgggcgagatgcggaagttctggaatgtttcttttttttggtgatggtgaactgatggtgcctgaagcaatttggctacttttgcaatgtgacaagttatggcagtgctgactggtggcgaagaattttgacgattgagtcatgcagaaaaaaacgggttcagcttcagttgattaaatgaggagtgagaagtccgaaacaggactcactgtataaataaacagctattttgttgaggaagggtaagataacggcgggtgcctgaagctttccggtttcaggtttactctgaggtctggaaagatgaagccccaggagatatttctatcaaccctggggctgccactccaaacccgaacaatttggatggtagtcccttcttcgcatggaggcaatataaacatgctgacgaaatatgcccttgcggcagtcatagtgctgtgtttaacggtgctgggatttacgcttctggtcggagactcgctgtgtgagtttacggtgaaggaacgtaatattgagtttaaggctgttctcgcttacgaaccgaagaagtagccgttgtgcggggagtaatcccataagcgctaacttaagggttgtggtattacgcctgatatgatttaacgtgccgatgaattactctcacgataactggtcagcaattctggcccatattggtaagcccgaagaactggatacttcggcacgtaatgccggggctctaacccgccgccgcgaaattcgtgatgctgcaactctgctacgtctggggctggcttacggccccggggggatgtcattacgtgaagtcactgcatgggctcagctccatgacgttgcaacattatctgacgtggctctcctgaagcggctgcggaatgccgccgactggtttggcatacttgccgcacaaacacttgctgtacgcgccgcagttacgggttgtacaagcggaaagagattgcgtcttgtcgatggaacagcaatcagtgcgcccgggggcggcagcgctgaatggcgactacatatgggatatgatcctcatacctgtcagttcactgattttgagctaaccgacagcagagacgctgaacggctggaccgatttgcgcaaacggcagacgagatacgcattgctgaccggggattcggttcgcgtcccgaatgtatccgctcacttgcttttggagaagctgattatatcgtccgggttcactggcgaggattgcgctggttaactgcagaaggaatgcgctttgacatgatgggttttctgcgcgggctggattgcggtaagaacggtgaaaccactgtaatgataggcaattcaggtaataaaaaagccggagctccctttccggcacgtctcattgccgtatcacttcctcccgaaaaagcattaatcagtaaaacccgactgctcagcgagaatcgtcgaaaaggacgagtagttcaggcggaaacgctggaagcagcgggccatgtgctattgctaacatcattaccggaagatgaatattcagcagagcaagtggctgattgttaccgtctgcgatggcaaattgaactggcttttaagcggctcaaaagtttgctgcacctggatgctttgcgtgcaaaggaacctgaactcgcgaaagcgtggatatttgctaatctactcgccgcatttttaattgacgacataatccagccatcgctggatttcccccccagaagtgccggatccgaaaagaagaactaactcgttgtggagaataacaaaaatggtcatctggagcttacaggtggccattcgtgggacagtatccctgacagcctacaaaacgcaattgaagaacgcgaggcatcgtcttaacgaggcaccgaggcgtcgcattcttcagatggttcaacccttaagttagcgcttatgggagtaatccccgcatatccggttgtcaggtcaggatggtaaggcacctgctttacactttcgcccgtggtcagtgatggctgcgggcgaatcgtaccagatgttgtcaattaatcgtgttggcacagcgttatgactatcttttcttttatctgccagtgcacagcaaacatctcattctcacgatgaatgatgacctgctgtttattccagctaattatctgatagtccagaaaacctgcatcagtttggatctcacttgccttaaatgcgctctctttggcggaaaatgccagtgtcagcgccagagaaaaggctaaaccgcagtctgcgagtcgctcgtgttccgctggtgtaataatgttgtctgtcaattctcttgcggtttgtacagaaaaaatttcttctatatcaatgccaatcggttgacgagataccacggctaatgccgtagtcccacagtggctaatactgccgtatacctccgcaggccagacaggttggcgtagctcgccgattgcgggcacacatttatagccatattcccgcaaagcataaacagcagcgatccgtccggctaaatgctctgttttacgtttacgtccagcgtgttgcagttgtgcgtagtgcggcagccagagtaaatcctgctcacaaaaattcgccggatcgaactcaacaaaatgcagcgtatgtccggcaaaggggagggaggtatgcgtagttttcatatcgaccatattcgagactgatgacaaacgcaaaactgcctgatgcgctacgcttatcaggcctacatggtcctgcaatatattgaattggcaagatttttgtaggccggataaggcgttcacgccgcatccggcatgaacgacgcgcactttgtcaacaatctgacgttagcatcagaagtgggtgtttacgctcatataccacgtacgtcccggctcgttataggtatacgccccggcaccggcgatatagttggcccctgccaaatcgcccgtggtctgggcattacccgcacgccacaaacgtttgtcgaacagattgtccacgccgccggtcagactgacattcttcgtcacatcccaggtcgcgctcaggccaacaatgctgtaaggactaatttctttggtttccggtccaaccgctggctgacctttatagttgtacttcttcggctgctgcttgccgtaccaggtgaaggtcgtttgcatcgacaaatcttcccgtgcctgccagctcagcgttgagttcaacgtatactccgggatgatcgacaaacggtcgcccgtggttttgttttcactcttcagcatataagtgatgttattggtccacatcaccgtttcgctaaccggtacgtttaacgatccttccagaccttcaaccaccgctttcggcacgttatcccactgatagagatcggtgccgactgcgttttgccctacagccacatagcccgcttcaatcttattgcgataatcgttacggaaccaggtgacgcccgccagccacccgtcgcgtttgaactccagaccaatctctttgttgatgctggtttctgctttcaggtcatcgttaccttgcagatagcagccgcccgcgctggcatagcaaccctgacctttactgtagagaatgtagttcgggttagtctggtacaggctcggcgctttataagcacgggcgatgcccattttcagcgtgaagtcatcgcctaaaccttgcgatatgttcagcgccgggctccagttattgccgacaatactgtgatgatcgaaacgcagccccggcgttacgatggtgctgtcagtcagctccatgttgttttcggcaaacagcgagaaaatttctgcttttgaatacgggctacggtcggtggtactcacgccatcaatagcgccaccggtattcgttccggtcagtgcctgggtgttggaacttaagtccttcatccgttgctgattccactccgtacccagcgtcagcgtctggttaacgaggaaatcaatcggcaggttaacttcgctgtgcagcatcacgtcatcaagatcgatatcgacgaaatcctgtgtcgctttttcgttaaatttcccttcggtaccgcccgccagaccttccggaatacgcgagttacgggtgtgttcgtactgcacccagttgctggtggtcacgccgttatcccagccaccgttccaggtcagcgcgtagttctggcgatacagacggttggtttcatcgccatatttcgagcgggtataggaatcggagttggtattctgggtgtcgcccgcatacaggttaccctggcggctgtaacctgcttccagttccagcgattgcaatggcgcgaaatcccagcgcaccacgccattaatatctttgttgattaccccttcgcgcccggctggtaacgtcgtggcatacgttccggcacgcgcggactgatggccctggttgatatcccacgcgtcagcctgggttttgtcgaggttgccatacaaacggaagctgaattcgtcgcccagcggaccggtcaggctaaagttagtgcgtttggtggcaccttcctctttatgttctggcgcattgaaatatgcgtcccaggagccgtgccactcgccgctgccttttttggtaatgatgttaaccacgccgcccgccgcgccgttgccataacgcgcagctgccggaccacgcagaacttcaatacgttcaatcatttcaggtggcacccaggaagtatcaccacgggtatcgcgctcgccacgccagccctgacgcaccgagttacggctgcttaccggcttgccgtcaatcaaaatcagcgtgttttccggacccataccgcgaatatcaatctgtcggttattcccacgctgaccactggtggagttaccggtcaggttaacgcctggcatggtacggatgatcttcgacacatcgcgggcaaccgggtttttgcggatttcatctgcggtgatggtcgaaacgccaggcgcctgtaagttctgctcggcggcggtaacgacaatagtatcgtcatgtgaaacaggagtatcggtcggctcttgtgcctgcgctaccccataaatccccagattgaccaacaaggccagggaatgaatcttcttgttcattgttttattcctgcatttttgccacgaattgcaactgtcgggcatggtcgtcatcaacacgacgcatcccgctaccgcgaaaacctttgatcctgaaagacacgcagtgcagttggttaattaatgtccgcgcttcccacggcgcgccattacgctattgcaaatgcaaatagttatcaataatattatcaatatatttctgcaatcaatgaaaaattgcacagtaaacatggggttatggtgtgacggcgttaaaagtaggaagtgagagctggtggcagtcgaaacatggcccggaatggcagcgtctgaatgacgaaatgtttgaggtcactttctggtggcgtgatccccaaggttctgaagaatactcgacgataaagcgcgtatgggtctacatcactggtgtgaccgatcaccatcagaacagccagccccagtcgatgcagcgaattgcaggcactaacgtctggcagtggacgacacaactcaatgccaactggcgcggcagctactgctttattcccaccgaacgcgatgacattttttctgtaccatcccccgatcgcctcgaattgcgcgaaggctggcgaaaactattaccccaggcgatagccgatccgctgaacctacaaagctggaaaggcgggcgagggcacgctgtttctgcactcgaaatgccgcaagcgcctctgcaaccgggatgggattgtccgcaagcgccagaaatacctgccaaagaaattatctggaaaagtgaacggttgaaaaagtcacggcgtgtatggatttttaccaccggcgatgcaacagcagaagaacgcccgctggcagttttgctcgatggcgaattttgggcgcaaagtatgcccgtctggccagtgctgacttcgctgacccatcgtcagcaacttcctcccgccgtgtatgtgttgatcgacgctatcgacaccacgcaccgcgcccacgaactgccgtgtaatgcggatttctggctcgcagtacagcaagagttattacccctggtgaaagctattgccccttttagcgatcgtgccgatcgcaccgtggttgccgggcagagttttggtgggctttccgcgctgtatgccggactgcactggcctgaacgctttggctgtgtattaagccagtcaggatcgtactggtggccgcatcggggcgggcagcaagagggcgtgttacttgaaaagctaaaagctggtgaagttagcgccgaaggtctgcgcattgtgctggaagcgggtattcgcgagccgatgatcatgcgggccaatcaggcgctgtatgcgcaattacaccccataaaagaatccattttctggcgtcaggttgacggcggacatgatgcgctttgttggcgcggtggcttgatgcaggggctaatcgacctctggcaaccacttttccatgacaggagttgaatatggcattcagtaatcccttcgatgatccgcagggagcgttttacatattgcgcaatgcgcaggggcaattcagtctgtggccgcaacaatgcgtcttaccggcaggctgggacattgtgtgtcagccgcagtcacaggcgtcctgccagcagtggctggaagcccactggcgtactctgacaccgacgaattttacccagttgcaggaggcacaatgagccagcatttacctttggtcgccgcacagcccggcatctggatggcagaaaaactgtcagaattaccctccgcctggagcgtggcgcattacgttgagttaaccggagaggttgattcgccattactggcccgcgcggtggttgccggactagcgcaagcagatacgctgcggatgcgttttacggaagataacggcgaagtctggcagtgggtcgatgatgcgctgacgttcgaactgccagaaattatcgacctacgaaccaacattgatccgcacggtactgcgcaggcattaatgcaggcggatttgcaacaagatctgcgcgtcgatagcggtaaaccactggtctttcatcagctgatacaggtggcggataaccgctggtactggtatcagcgttatcaccatttgctggtcgatggctttagtttcccggccattacccgccagatcgccaatatttactgcacatggctgcgtggcgaaccaacgcctgcttcgccatttacgcctttcgctgatgtagtggaagagtaccagcaataccgcgaaagcgaagcctggcagcgtgatgcggcattctgggcagaacagcgtcgtcaactgccgccgcccgcgtcactttctccggcacctttaccggggcgcagcgcctcggcagatattctgcgcctgaaactggaatttaccgacggggaattccgccagctggctacgcaactttcaggtgtgcagcgtaccgatttagcccttgcgctggcagccttgtggctggggcgattgtgcaatcgtatggactacgccgccggatttatctttatgcgtcgactgggctcggcggcgctgacggctaccggacccgtgctcaacgttttgccgttgggtattcacattgcggcgcaagaaacgctgccggaactggcaacccgactggcagcacaactgaaaaaaatgcgtcgtcatcaacgttacgatgccgaacaaattgtccgtgacagcgggcgagcggcaggtgatgaaccgctgtttggtccggtactcaatatcaaggtatttgattaccaactggatattcctgatgttcaggcgcaaacccataccctggcaaccggtccggttaatgaccttgaactggccctgttcccggatgtacacggtgatttgagtattgagatcctcgccaataaacagcgttacgatgagccaacgttaatccagcatgctgaacgcctgaaaatgctgattgcccagttcgccgcggatccggcgctgttgtgcggcgatgtcgatattatgctgccaggtgagtatgcgcagctggcgcagctcaacgccactcaggttgagattccagaaaccacgcttagcgcgctggtggcagaacaagcggcaaaaacaccggatgctccggcgctggcagatgcgcgttacctgttcagctatcgggaaatgcgcgagcaggtggtggcgctggcgaatctgctgcgtgagcgcggcgttaaaccaggggacagcgtggcggtggcactaccgcgctcggtctttttgaccctggcactccatgcgatagttgaagctggagcggcctggctaccgctggataccggctatccggacgatcgcctgaaaatgatgctggaagatgcgcgtccgtcgctgttaattaccaccgacgatcaactgccgcgctttagcgatgttcccaatttaacaagcctttgctataacgccccgcttacaccgcagggcagtgcgccgctgcaactttcacaaccgcatcacacggcttatatcatctttacctctggctccaccggcaggccgaaaggggtaatggtcgggcagacggctatcgtcaaccgcctgctttggatgcaaaatcattatccgcttacaggcgaagatgtcgttgcccaaaaaacgccgtgcagttttgatgtctcggtgtgggagtttttctggccgtttatcgcaggggcaaaactggtgatggctgaaccggaagcgcaccgcgacccgctcgctatgcagcaattctttgccgaatatggcgtaacgaccacgcactttgtgccgtcgatgctggcggcatttgttgcctcgctgacgccgcaaaccgctcgccagagttgcgcgacgttgaaacaggttttctgtagtggtgaggccttaccggctgatttatgccgcgaatggcaacagttaactggcgcgccgttgcataatctatatggcccgacggaagcggcggtagatgtcagctggtatccggcttttggcgaggaactggcacaggtgcgcggcagcagtgtgccgattggttatccggtatggaatacgggtctgcgtattcttgatgcgatgatgcatccggtgccgccgggtgtggcgggtgatctctatctcactggcattcaactggcgcagggctatctcggacgccccgatctgaccgccagccgctttattgccgatccttttgccccaggtgaacggatgtaccgtaccggagacgttgcccgctggctggataacggcgcggtggagtacctcgggcgcagtgatgatcagctaaaaattcgcgggcagcgtatcgaactgggcgaaatcgatcgcgtgatgcaggcgctgccggatgtcgaacaagccgttacccacgcctgtgtgattaaccaggcggctgccaccggtggtgatgcgcgtcaattggtgggctatctggtgtcgcaatcgggcctgccgttggataccagcgcattgcaggcgcagcttcgtgaaacattgccaccacatatggtaccggtggttctgctgcaacttccacagttaccacttagcgccaacggcaagctggatcgcaaagccttaccgttgcctgaactgaaggcacaagcgccagggcgtgcgccgaaagcgggcagtgaaacgattatcgccgcggcattctcgtcgttgctggggtgtgacgtgcaggatgccgatgctgatttcttcgcgcttggcggtcattcgctactggcaatgaaactggcagcgcagttaagtcggcaggttgcccgccaggtgacgccggggcaagtgatggtcgcgtcaactgtcgccaaactggcaacgattattgatgctgaagaagacagcacccggcgtatgggattcgaaaccattctgccgttgcgtgaaggtaatggcccgacgctgttttgtttccatcctgcgtccggttttgcctggcagttcagcgtgctctcgcgttatctcgatccacaatggtcgattatcggcattcagtcaccgcgccccaatggccccatgcagacggcggcaaacctggatgaagtctgcgaagcgcatctggcaacgttacttgaacaacaaccgcatggcccttattacctgctggggtattcccttggcggtacgctggcgcagggtattgcggcgcgactgcgtgcccgtggcgaacaggtggcatttcttggcttgctggatacctggccgccagaaacgcaaaactggcaggaaaaagaagctaatggtctggacccggaagtgctggcggagattaaccgcgaacgcgaggccttcctggcagcacagcagggaagtacttcaacggagttgtttaccaccattgaaggcaactacgctgatgctgtgcgcctgctgacgactgctcatagcgtaccgtttgacggtaaagcgacgctgtttgttgctgaacgcacacttcaggaaggtatgagtcccgaacgcgcctggtcgccgtggatagcggagctggatatctatcgtcaggattgtgcgcatgtggatattatctctccagggacgtttgaaaaaattgggccgattattcgcgcaacgctaaacaggtaaattaatattatttataaacccataattacagaaaataattatgggttttttatttgtttgatttataggtttgatgaatatttctcttaaatagagtgaatgttgcattcagtggaaggaatttacaaacttcagcttcggataattatcaccaactggtaaagtgagcgccgtggagatttccccctattggactcattttcaggttataccccatgtcatcactgaatattaaacagggaagtgacgctcattttcccgattatcctctggcgtcgcccagtaataatgaaattgatttacttaatctaatctcagttttatggcgggccaaaaaaacggtcatggcggtcgtttttgcgtttgcctgcgcaggcttgctgatctctttcatcctgccgcaaaaatggaccagcgcggcggttgtcacgcctccagaacctgttcagtggcaagagttggagaaatcattcactaagcttcgtgtgctggatctggatatcaaaattgatcgtacagaagcatttaacctgtttatcaagaagtttcagtcggttagcttgctggaagagtacctgcgttcatcaccttatgtgatggaccaattaaaagaggcgaaaatcgacgaactggatttgcatcgcgcaattgtcgcattgagcgaaaaaatgaaagcggttgatgacaatgccagtaagaaaaaagatgaaccgtcactgtatacctcctggacgctaagttttaccgcgccaaccagtgaagaggcgcagaccgttttgagcgggtatatcgattatatctctacgttggtggtgaaagagtcgctagaaaacgtccgtaataaactggagatcaaaacccagtttgaaaaagaaaaactggctcaggatcgcattaaaacgaaaaatcaacttgatgcaaacattcagcgcctcaattattcactcgacattgccaacgcggcaggaattaaaaagcccgtttacagtaatggtcaggccgttaaagatgaccccgatttttctatttctctcggtgcagacggtattgaacgcaaactggaaatagaaaaagcggtcactgacgttgcggaactgaacggtgaattacgtaatcggcagtatcttgtcgagcaattaacaaaagcacatgtcaacgatgtgaattttacgccgtttaaatatcagttaagcccgtcattgccagtgaaaaaagacggtccgggtaaggcgattattgtgatcctttccgcgttgatcggcgggatggtggcttgtggtggcgtgctgttgcgctatgcgatggcatccagaaaacaggatgccatgatggcagaccacttagtttaactatttgcggttgaaggtgccgttcgtccgagcggcaccacaagcggcgttccggcaactggatcgtcaatgatcatgcagcgcagaccataaatgcgctcaatcagttcagcagtgacaatctccttcggcgctccctgagcaacaattttcccttcccgcaatgcaatcaaatggctggcgtaacgacaggcctgattaagatcgtgcagcaccgccgccagggtatagcctttttcgcggttcagttcgcttaacaactccagcaaatcaatctgatgactgatatccagccaggtcgtgggttcgtcgagcagcataattgccgtttcctgggccagcaccatcgcgatccacgctcgctggcgttgtccgccagaaagggtatccacgctttgatctgccagatgagttattcccgtggcctgcattgctttcgttaccgcttcttcatcctctttgcgccagcgggtaaacagcggttgatgcggataacgtccacgcgccaccagctcctgcacggtgatatcgcccggcgtggtagcattttgcgccaacagaccaatccggcgtgcaacctctttactggcgtaatgttgaatgtgctcgccatccagccagacatgcccatgagcaggcgtcatcaggcggcttaaggtacgcagtaacgtggatttaccgcagccatttggcccgataattgccgtgaagtgaccatcaggtatttctacagtcagattttccgcaacggtatatttgccatatcccagggttaactgttcgccgcgcaaacgggctactgattcggtcattttttgcgagactcctgaattaacaagacgataaggtaaataccgccgaggctgacggtaacgacgccaaccggaagttgatacggcataaacagttgttgggcgcagagatcggccgccagcagtaacagcgccccgcatagcgccgcctgggttagcccccagcgagcggtgccgctaatgcgtcgggcaatgtgcggtgcgactaaagcaataaaggaaatcggcccggcaagcgctgttgccgcagcggtaagcaccactgcaaccagcatcattaacagacgcgaacgttcgacgctgacgcccagcgcacacgcggtatcatcgcccatttccagcaagcgcatccggcgtaccagtaaggcggcggcaatgagcatcaatataatgatgggtgcggaaggcgaggtttttgcccacgtcaggccgttgagcgatccggcattccacaaacctgctgttagcgccgtttctaaagacgctttcagcaacagccaggtattaaaggccaccagcatggcgcgaacgccgataccgataataatcaaccgaaaggtgtcgatgccgttgcgccaggcgagcagccagaccagcagcgaagtgacaatgccgcccaccattgctgacagcgcgatagccgtcaggtcctgaccaaacagcaccatcgccaccagcacgccgctccacgccccggtgttaaagcccattacgtcagggctgccgagcgggttacgcatcagcgactgaaaaatcgcgccactgacgcccagtgctgcgccaatcaacagcgccatcagcacgcgtggtaaacgccattcggtgaccaccatcgtcatactgcgcggcgcatcgcccatcagcgcggcgaatacctgcgaggtttccagcgtgacggcaccgctgcgtaatccccagatacctgcaaccacacaggcggaaaccagcagcaaacaggtgatgagtaatcggcgagagacgtaaatcatgcaccacctcgcgttttacgtcgcacgaggaagatcagcaccggtgcaccaataaacgcactgaccacagaaacgcgcagttcgccgggcacaatcacccgcccgatgatatcggcaaacagcagcagggcaggggtagcaagtagcgtgacgggcagcgaccagcgatgatcggcacccaccagccaacgcgccatatgcggcatcatcaggccaataaaggcaatcgggccaactattgccgtcgcactaccacaaagcacggtaatcgccagcagaccaatcaactgtgtgcgcgccacgcgactgcccagcgccgtcgcggtgtcgctgccgaggctcaaactgttcagcgcgcgactcagtaatagcgcagttgctccggcgatcagcaccgggatcagcaccacttttaaggtatgtagattgcgaatatccagcgaaccggcttgccagaaacgcaactgatcgtagacgtcaggattaagcagggcgatgccgctggtcagtccttccagcaccgccgccagcgccacgcccgccagggttaaacgcaccggacttaactgcccgccgccctgactgccggtaaaggcaacaatcaatgaggccaccagcgccccggcgaaggccatcgccagttgttcctgcgcggaagagtaaccaaacagcgccgcacccagcacaatggcaaagctggctccggcgttcacgccaagcaagccggggtcggcaagtgggtttcgggtgagggtttgcattaacgccccggcaaggccaagcgcgccgcctgccagtaaaccggcaagggtacgcggcagccgcgcgtcgagcacgatggtgcagtcggcgctctggcaggtgccggagaaggcctccagcactacggaagcggggagtgattttgccccaatgagcaggcttaatgccgtcgcgataatcagtaataacagcaatccgggcacggcaatggcgcgtgtcacggcaacagaaccagacatacgaacttccatgataatgaaattaattatcgttatcgatcttatttggatatgttagcatgtgcagcctaagaataggtatttaaaatatttgatggcaaggcattgtaatgaataaacaatcctggctgcttaacctcagcctgttgaaaacgcacccggcgtttcgcgcagtattcctcgctcgtttcatctcaattgtgtctctgggtttgctcggcgtcgcggtgccggtgcagatccagatgatgacacattccacctggcaggtggggctttcggtgacgctgaccggcggcgcgatgtttgttggcctgatggtcggcggtgtgctggcggatcgctatgagcgcaaaaaagtgattttgctggcgcgcggcacctgtggcattggcttcattggactgtgccttaatgcactgctgccggagccgtcattgctggcaatctatttacttggtttatgggatggttttttcgcatcgcttggcgttacggcgctattggcggcgacaccagcactggtagggcgtgaaaacttaatgcaggccggggcgatcaccatgttgaccgtgcgtctggggtcggtgatttcgcccatgattggcggtttattgctggcgaccggtggcgtagcctggaactacgggctggcggcggcgggcacgtttattaccttgctaccgttgttaagccttccggcgttgccaccgccaccgcagccgcgtgagcatccgttgaaatcattactggcaggatttcgttttctgcttgccagcccgctggtgggcgggattgcgctgctgggtggtttattgacgatggcgagcgcggtgcgggtactgtatccggcgctggctgacaactggcagatgtcagcggcacagattggttttctctacgcggcgatcccgctcggcgcggctattggtgcgttaaccagcgggaagctggcacatagtgcgcgaccagggttattgatgctgctctccacgctgggatcgttcctcgccattggtctgtttggcctgatgccgatgtggattttaggcgtggtttgtctggcgctgttcggctggttgagtgcggtcagctcgttgctgcaatacacaatgctgcaaacgcaaaccccggaagcgatgttagggcggattaacggtttgtggacggcgcagaacgtgacgggcgatgccataggcgcggcgctgctgggtggtttgggcgcgatgatgacaccggttgcttccgcaagcgcgagcggttttggtttgttgattatcggcgtgttgttattgctggtgctggtggagttgcgacattttcgccagacgccgccgcaggtgacagcgtccgacagttaatgcttaaaacagcgccttaagcctatccagcacttgcatggcgctgtagtaatccagacggaacgtctcggttcccagcgcataaacctgcttgttttgtactgcaggcaggtgcgcgagcagcggattagcataaatagcatcggcatctttctgatcaccggcgaacaggaatagtgactcgccatttaaccctgcagccagattttccccaccaagctgaatgatgtcatggcgtttaccctgactttggctggcatttaaccctgcgggtaacttcgccagcgtaaagccgagttgttccagcatctgcccttgtgctgattctggcgtccagagattggcactgtgtgcagcggcagtatagacaatggcagtgaccggctgcggcggtaatttgatttgctctttcgccgccgccagttgcttatcaaactgcgcaatccgctctgccgcttgtttctcatgcccggtaatttcgccaagttgcgttaacagcgactgccagcttttgtcgtcgtaattgatgattaatgtcggggcgatggtggaaagctgatcatacagtgccagcgccgaatccccgccggttgcgctaattaaaatcagatccggcatttgcgcggcaacggcttcggcgctcggttcgccgatatagagccgttgcagtttgcgttctttcgccaccttgctccactggcgtaaaaagccctggtcatccgcgacgcggttattcggcgtggtcgcgccgctggcgatcaccggagcatcaatcgccagcagtgagccggtcagggtgacgctggtggaaacaatacgctgcggctggctttccagtgtatgtgtgccacggctgtcagtaatctgacgcggccagtcagcggcctgaactgcggctattcctgaaagcaaaagtcctgttaatagaagggcgttgcggtagagcggggcgagtctcacaaatcagcttcctgttattaataaggttaagggcgtaatgacaaattcgacaaagcgcacaatccgtcccctcgcccctttggggagagggttagggtgaggggaacagccagcactggtgcgaacattaaccctcaccccagccctcaccctggaagggagagggggcagaacggcgcaggacatcacattgcgcttatgcgaatccatcaataatgcttctcattttcattgtaaccacaaccagatgcaaccccgagttgcagattgcgttacctcaagagttgacatagtgcgcgtttgcttttaggttagcgaccgaaaatataaatgataatcattattaaagcctttatcattttgtggaggatgatatggatacgtcactggctgaggaagtacagcagaccatggcaacacttgcgcccaatcgctttttctttatgtcgccgtaccgcagttttacgacgtcaggatgtttcgcccgcttcgatgaaccggctgtgaacggggattcgcccgacagtcccttccagcaaaaactcgccgcgctgtttgccgatgccaaagcgcagggcatcaaaaatccggtgatggtcggggcgattcccttcgatccacgtcagccttcgtcgctgtatattcctgaatcctggcagtcgttctcccgtcaggaaaaacaagcttccgcacgccgtttcacccgcagccagtcgctgaatgtggtggaacgccaggcaattccggagcaaaccacgtttgaacagatggttgcccgcgccgccgcacttaccgccacgccgcaggtcgacaaagtggtgttgtcacggttgattgatatcaccactgacgccgccattgatagtggcgtattgctggaacggttgattgcgcaaaacccggttagttacaacttccatgttccgctggctgatggtggcgtcctgctgggggccagcccggaactgctgctacgtaaagacggcgagcgttttagctccattccgttagccggttccgcgcgtcgtcagccggatgaagtgctcgatcgcgaagcaggtaatcgtctgctggcgtcagaaaaagatcgccatgaacatgaactggtgactcaggcgatgaaagaggtactgcgcgaacgcagtagtgagttacacgttccttcttctccacagctgatcaccacgccgacgctgtggcatctcgcaactccctttgaaggtaaagcgaattcgcaagaaaacgcactgactctggcctgtctgctgcatccgacccccgcgctgagcggtttcccgcatcaggccgcgacccaggttattgctgaactggaaccgttcgaccgcgaactgtttggcggcattgtgggttggtgtgacagcgaaggtaacggcgaatgggtggtgaccatccgctgcgcgaagctgcgggaaaatcaggtgcgtctgtttgccggagcggggattgtgcctgcgtcgtcaccgttgggtgagtggcgcgaaacaggcgtcaaactttctaccatgttgaacgtttttggattgcattaaggagcgaggatgagcattccattcacccgctggccggaagagtttgcccgtcgctatcgggaaaaaggctactggcaggatttgccgctgaccgacattctgacgcgacatgctgcgagtgacagcatcgcggttatcgacggcgagcgacagttgagttatcgggagctgaatcaggcggcggataacctcgcgtgtagtttacgccgtcagggcattaaacctggtgaaaccgcgctggtacaactgggtaacgtcgctgaattgtatattacctttttcgcgctgctgaaactgggcgttgcgccggtgctggcgttgttcagccatcagcgtagtgaactgaacgcctatgccagccagattgaacccgcattgctgattgccgatcgccaacatgcgctgtttagcggggatgatttcctcaatactttcgtcacagaacattcctccattcgcgtggtgcaactgctcaacgacagcggtgagcataacttgcaggatgcgattaaccatccggctgaggattttactgccacgccatcacctgctgatgaagtggcctatttccagctttccggtggcaccaccggcacaccgaaactgatcccgcgcactcataacgactactactacagcgtgcgtcgtagcgtcgagatttgtcagttcacacaacagacacgctacctgtgcgcgatcccggcggctcataactacgccatgagttcgccaggatcgctgggcgtctttcttgccggaggaacggttgttctggcggccgatcccagcgccacgctctgtttcccattgattgaaaaacatcaggttaacgttaccgcgctggtgccacccgcagtcagcctgtggttgcaggcgctgatcgaaggcgaaagccgggcgcagcttgcctcgctgaaactgttacaggtcggcggcgcacgtctttctgccacccttgcggcgcgtattcccgctgagattggctgtcagttgcagcaggtgtttggcatggcggaagggctggtgaactacacccgacttgatgatagcgcggagaaaattatccatacccagggttacccaatgtgtccggatgacgaagtatgggttgccgatgccgaaggaaatccactgccgcaaggggaagtcggacgcctgatgacgcgcgggccgtacaccttccgcggctattacaaaagtccacagcacaatgccagcgcctttgatgccaacggtttttactgttccggcgatctgatctctattgatccagagggttacatcaccgtgcaggggcgcgagaaagatcagattaaccgtggcggcgagaagatcgctgccgaagagatcgaaaacctgctgctgcgccacccggcggtgatctacgccgcactggtgagcatggaagatgagctgatgggcgaaaaaagctgcgcttatctggtggtaaaagagccgctgcgcgcggtgcaggtgcgtcgtttcctgcgtgaacagggtattgccgaatttaaattaccggatcgcgtggagtgtgtggattcacttccgctgacggcggtcgggaaagtcgataaaaaacaattacgtcagtggctggcgtcacgcgcatcagcctgaaggagagaacacgatggctattccaaaattacaggcttacgcactgccggagtctcacgatattccgcagaataaagttgactgggcctttgaaccgcaacgtgccgcgttgttaatccatgatatgcaggactattttgtcagcttctggggcgagaactgcccgatgatggagcaggtgatcgcgaatattgctgcgctgcgcgactactgcaaacagcacaatatcccggtttattacaccgcccagccgaaagagcagagcgatgaagatcgggcgctgttgaatgatatgtgggggccgggcctgacccgctcgccggaacagcaaaaggtggtggatcgcctgacgccagatgccgacgacacggtgctggtgaagtggcgctacagcgcgtttcatcgttctccgctggagcaaatgctgaaagagagtggacgtaaccagctgattattaccggggtatatgcccacattggctgtatgaccaccgcaaccgacgcatttatgcgcgatattaaaccgtttatggtggcggatgcgctggccgatttcagccgtgacgagcatttgatgtcgctgaaatatgtggccggacgttctggccgggtggtgatgactgaagaattactgccagcacctatccccgccagcaaagcggcgctgcgtgaggtgatcctgccgttgctggacgagtccgatgaaccgttcgatgacgacaacctgatcgactacggtctggattcggtgcgcatgatggcgctggcggcgcgctggcgcaaagtgcatggtgatatcgactttgtcatgctggcgaaaaacccgaccatcgacgcctggtggaagctactctcccgcgaggtgaaataatggatttcagcggtaaaaatgtctgggtaaccggcgcaggtaaaggtatcggctacgccacggcgctggcgtttgttgaggcgggagcgaaagttacaggttttgatcaagcgttcactcaggagcaatatccctttgcgaccgaagtgatggatgttgccgacgctgcgcaggtcgcgcaagtgtgtcagcgactgttagctgaaacggagcgactggacgcgctggtcaatgcggcgggaattttacgcatgggcgcgaccgatcagctcagtaaagaggactggcagcagacttttgcggttaacgtcggcggtgcgtttaacctgttccagcaaaccatgaaccagtttcgccgtcagcggggcggggcgattgtcactgtggcgtccgacgccgcgcacacgccgcgtattggcatgagtgcttatggcgcatcgaaagcggcgctgaaaagcctggcgttgagcgtcgggctggaactggcgggtagcggcgtgcgctgtaatgtggtttcgcctggctccaccgacaccgatatgcaacgcacgctgtgggtgagcgatgacgccgaagaacagcgtattcgcggctttggcgagcagtttaaactcggcattccgctggggaaaatcgcccgtccacaagagatcgccaacacgattttgttcctcgcctctgacctcgccagccatattaccctacaggatattgtggtcgatggcggctcaacgctgggggcataagcatgatctggaaacgccatttaacgctcgacgaactgaacgccaccagcgataacacaatggtggcgcatctgggaattgtgtatacccgtctgggcgatgatgtgctggaagccgaaatgccggttgatacccgtactcatcagccgttcggtttactacatggcggcgcgtcggcggcgctggcggaaacgctgggatcgatggccggatttatgatgacccgcgacggacagtgtgtggtaggcacagaacttaatgcaacacaccatcgcccggtgtctgagggaaaggtacgcggcgtctgccagccgctgcatcttggtcggcaaaatcagagctgggaaatcgtcgttttcgatgaacaggggcggcgttgctgcacttgtcggctgggtacggcagttttgggatgaacccgacagaattagatgagattgcaggaaaactcggttaacggagtgatcgagttaacattgttaagttaaatattggtttcaactccgatttacatggttgctgtgttgttaaattgtacaaagatgttatagaaacaaaatgtaacatctctatggacacgcacacggataacaactatgaacaaatcagggaaatacctcgtctggacagtgctctctgtaatgggagcatttgctctgggatacattgctttaaatcgtggggaacagatcaacgcgctgtggattgtggtggcgtcggtctgtatctatctgatcgcttaccgtttttatgggctgtatatcgccaaaaatgtgctggcggttgacccgacgcgtatgacgccagcggtgcgccataacgacgggctggactatgtgccgacggacaagaaagtgctgttcggtcaccattttgcggccattgccggagcaggtccgctggtggggccggtactggcggcgcaaatgggctacctgccggggatgatctggctgctcgctggggtggttctcgccggtgcggtgcaggatttcatggtgctgtttgtttctacgcgccgtgacggtcgctcgctgggtgagctggtcaaagaagagatggggccaaccgccggggtgattgcgctggtggcctgctttatgatcatggtcattatccttgcagtgctggcgatgatcgtggtgaaagccctgactcatagcccgtggggaacatataccgttgcgttcaccattccgctggcgctgtttatggggatctacctgcgctatctgcgtccggggcgtattggcgaagtgtcggtcatcggtctggtattcctgattttcgccattatctctggcggctgggtggcagaaagtccgacctgggcaccgtactttgactttaccggcgtgcagttgacctggatgctggtgggttacggttttgtggcggcggtgctgccggtgtggttactgctggccccgcgtgactacctctctaccttcctgaaaatcgggactatcgtcggtctggcggtaggcattttgattatgcgcccgacgctgaccatgcctgcgctgaccaaatttgtcgatggcactggcccggtatggaccggtaacctgttcccgttcctgtttatcaccatcgcctgtggcgcggtgtctggcttccatgcgctgatctcttctgggaccacgccgaagatgctggcgaacgaagggcaggcgtgctttatcggctacggtgggatgttaatggaatccttcgtggcgattatggcgctggtttccgcctgtatcatcgatccgggcgtgtattttgccatgaacagcccgatggcggtgctggctccggcagggacggcggatgtggtcgcttctgccgcgcaggtggtgagtagctggggctttagcattacaccagatacgctaaaccagattgccagcgaagtgggtgaacagtcgatcatttcccgtgcgggcggtgcgccgacgctggcggtggggatggcctacattctgcacggcgcgctgggcggcatgatggatgtggcgttctggtatcacttcgccattttgtttgaagcactgtttattctgacggcggtggatgcaggtacgcgtgctgcgcgctttatgttgcaggatctgctgggcgtggtgtctcctggcctgaagcggaccgattcactgcctgctaacctgctggcaacagcgctgtgcgtactggcgtggggctacttcctccatcagggcgtggtcgatccgctgggcggcattaacactctgtggccgctgtttggtattgccaaccagatgctggcagggatggcgctgatgctctgtgccgtggtgttgttcaagatgaaacgtcaacgttacgcctgggtggcgctggtaccaacggcctggctgctgatttgtaccctgaccgcaggctggcagaaagcgtttagcccggatgcgaaagtcggcttcctggccattgctaataagttccaggcaatgatcgacagcggcaatattccgtcgcagtatactgagtcacagctggcgcaactggtgttcaacaaccgtctggatgccgggttaaccatcttctttatggtggtcgtggtggttctggcactgttctcgattaagacggcacttgcggcattgaaagatccgaagccaacggcgaaagaaacgccgtatgaaccaatgccggaaaatgtcgaggagatcgtggcgcaggcaaaaggcgcacactaaagtcagagtgagggggggatgttggcgaatgttggcttagtgcccagggttccctctcaccctaaccctctccccggtggggcgaggggactgaccgagcgcgttgatagcatttgtaggccggataaggcgttcacgccgcatccggcactctttcagcaacatggttagcggaggccaagatgtttgattcactggcaaaagccggaaaatatttaggtcaggcggcgaagctgatgattggtatgcctgattacgacaactatgtcgaacatatgcgggttaaccatcccgatcaaacgccgatgacctacgaagagtttttccgtgagcggcaggacgcgcgctacggtggaaaaggcggcgcgcgctgctgctaaatttgtacgtcaggctttaaacgattccacttttttgaacgctgcacgcaacgtatctggtgtcagcgtgactggcaggtaatgaatggactccaccggacgcagggtgtgggcaatcactttgtcgatctccgcctgattattgatatccacttccagctccgccagtgtagtcggcagatgaaaacgctgatacgctccagttaattgcgccagcacatcatcctgacccagcaaggcgctttgcaccagaattccgtaggcgactttggtgccgtggagaaacttctcggtttgcggcagcacggtcagaccgttatgcacggcatgagctgccgccacacgcgtaaaacgatcgcccagaccaccaaccatcccaccaccagcaataatagcatccaccacatcgcaaaatgattgcgttaactgttgattttgctgatcgctcagcgcctgttcgctactgtttaacaagacgtcgcgaatggcttgcgcattattgatccccagtcgcacggttagcggcaacgtttctggttgcggagccagcaccaccgcttcataccatttcgccagcgtgtcaccgatccccgccagcagatattgttgcggtgcattgaggataatctccggttccaccagcaccataaaattggcgtcgtcgaaaatctcataatgcagcgcctgtccggcatcattataccagacggagagcggtgtccaggcggcgcaggtggcggcgatcgtcggaacggcaacaaacggcagaccgagacggcgggcgagggctttcgcggtgtcgagcagtgcaccgccaccgacgccaatcaccacgctgcggtcgtcaccggactcagccgccagttgttgtacatcgctttcgctgcaatgaccgcgaaacaaaatatgctttgcccctggcagtccaaacgctggcggaagtttggtttgcgccgcagcaatggcgcgtttgccgtagatccacaccgcgcgagaaagttgttcatcagtgaaaaaatcgtgcaggtgattgaaacttcctggatgtgaaaagtagttagccgggccgacgaccacgcggataggattgtgaggcatgttgtgttgtccttattgttttatttagacatctaaacgtcttgattgccaaatactagcatcgtgttatagtgccttcaacacgcaacttcgtcaggtacaataaaaatgacaaataaccctctgattccacaaagcaaacttccacaacttggcaccactattttcacccagatgagcgcgctggcgcagcaacaccaggcgattaacctgtcgcaaggctttcctgattttgatggtccgcgctatttacaggagcggctggcgcaccacgttgcacagggggcaaaccaatacgcgcccatgaccggcgtgcaggccttgcgcgaggcgattgctcagaaaacggaacgtttgtatggctatcaaccagatgccgatagcgatatcaccgtaacggcaggggcgacggaagcgttatacgcggcgattaccgcactggtgcgcaatggcgatgaagtgatttgttttgatcccagctatgacagttacgcccccgccatcgcgctttctgggggaatagtgaagcgtatggcactgcaaccaccgcattttcgcgttgactggcaggaatttgccgcattattaagcgagcgcaccagactggtgatcctcaacactccgcataaccccagtgcaactgtctggcagcaggctgatttcgccgctttgtggcaggcgatcgccgggcacgagatttttgtcattagcgatgaagtctacgagcacatcaacttttcacaacagggccatgccagtgtgctggcgcatccgcagctgcgtgagcgggcagtggcggtttcttcatttggcaagacctatcatatgaccggctggaaagtgggttattgtgttgcgccagcgcccatcagcgccgaaattcgcaaggtacatcagtatctgaccttttcggtgaataccccggcacagctggcgcttgctgatatgctacgtgcagaacctgagcattatcttgcgttaccggacttttatcgccagaagcgcgatattctggtgaatgctttaaatgaaagccggctggagattttaccgtgtgaaggtacatactttttgctggtggattacagcgcggtttctaccctggatgatgttgagttttgccagtggctgacgcaggagcacggcgtagcggcgattccgctgtcggtgttttgcgccgatcccttcccacataaactgattcgtctctgttttgccaagaaggaatcgacgttgctggcagcagctgaacgcctgcgccagctttagctatttaaccgtccaggcgcgggaatattgacggtcggcaaacaactcttgcaggccgttaatttgcttcaggcgcagcacttcgtcgctgtccattcccagctctttgccaattttattatcgtcccatcccaactggctaagttcacggacgatttccgacatggcggtgatttgatggcgtccacgagcgcgattatgacgaatagtcgcggcgatgcgttgattacgcgtaccttccagacaggtcaccggcaaataaccttttaagcgtaattttaatgatgatgagcctttaccaatttcatggcggtgaaaaccatccacgatttccatggcatttttatccgtatgtgtgaccacaatgggttgggtaaaaccatctatttcaatggatttttgcagcagttttttttcgggtggtgccacgttgtttgggttgtaatcattaggcataagttggctgtttttaacccacagaacgcaatccactggctcttcacgaaaggggctaacctgatggatcgccatgcggatttcattaatcgctttgatgcgatcatcttccggcaagctggcgagaaattgcgttaaatcctgcgttaatcgttgttgcatagtatcccccattcctgacgttttccttttatccgttcgttataacgctgatagttcttcgattttgtggggctaaatgataatgcccgacaccagtaatcgttattgagtaaaactttgcatatccgccgccaggaggggatatctttcgcgccaatgtccccttgctgggtttgtggaacctcgatgccttttttctgataccagtgcaaataaatggcgattttattgcggtaatgctcagctgttttttccggcatgctattgagcagcaataatgcatattcttgccagtctaaatgttctggcttgaggattttccgatgcccatagaaatgattgtcatgtccggcgtaaatgccgccactttttaccccgctgactcgtgcgcacatagcagcccagcgatccggttcgataacgtgatagagccataatccttgtcgttgctccgggccaaaaggttcgcaaattcgcatatgacgcagaggaacgcctgcctgatacattaggttatacagtgggttgcagagactttgatgatttgcataccaggtccagatatcagccactttccagtcgtaaatggggtaaatgtaccagctatgaccgcctggtgcggccgtagtccagggtttatcgtcggcaaaacgttgtttatttaaactggcgatggcgacaaaacggttgtaggactcatccgcacggatgccgatcatcatcgccgccggacgtttttgtgaaaaccattcggcaaactcacgtacaaattgttcgaaggtcatgcctggctggtaaaagcagaaaaagtcagggtcggttatcgcatcttggggaggttgacgtacccattcgacatcaggttcccagcactgccattcgggttggtattgtgaaagggaattttgcgtcgtaagcgggagcgcaacccagtaaaactcttcgatgacatcggtgtacaactcgcgcagggactgaacatagttaatggtgcaagagaattgcgcctcccagtcgataaacaaaacgcagatttttttgcccatttgtcgggcaagttcggctgtcagatgcagcattaaaccagagtctttgccgccagaaaatgagacacaaacgcggggtagggtgttgagtgtccaggtaatacgctctcgtgcagcttccagaatattgagcggaagaggaattttataaatagacatctgaagacgctctctgaacgttacagggtgatcagtgagataagtctgttaattataaagtaaacactgtaaagcagagtgttttatttttcattcgcgctgtgaataaatagatgaaagttatagtagctgtctgtagttatatatcaaaaactctcatttagacggtcaataaatcgggagaacaccaaattatttaaagaagatttattataggaaatgtaaagctttattgaaggtaacggatgttctagttttatctcttttaagttaagaaagtcacggtaggaattataaagttcataggggactattcccagtaaatctgtaactgcaatgctattaatgattgtcagcaaagaggaaccacgaaatgagattttgcgattcataaatctctcgtctatttccatttgaatatcatcaacccctgctgatttagatattaattgggtgaactcttctgccataatttgttcataagtgctattgtcagtaattcgtggatgcctattactacaaattagagtattgcgaatcgtatgcaatggcatgcaaatgacggaacggctgatcactggcatttgggtgatcaccagatcggctttgcggtgaaccaacagttcttcagcattctctgctgacatgaggatatcatggcactcaatctcgacagaggaatcttgccgtaggcagcggatcagcatactattattagagcaagaaatgagctgagggccgtagataataaagtttttctttagttcggacttattgactatattaattgtttgttcaaggcctctgagatttttctcaagatggtgatgcagatttaaccctgttgtcgtcggcgcgataccttttcctgagcgaatgaataaagggtcattaaattgcgcacgtaagcgttgtaacgactggctcacggctgatggggtgatatatagtgattcagcagctttgctaatgcttaaatgctggtaaatacactcaaatatgacaagaagatttaagtcgaactttttcaagtcgtagagattggccatacactactccggttatatttttcttccatgatatattcacttaatcaatgttttttgcgtatatatttttattgattatgtttttttgcttaactcaggattaagtttttctaaaatagcacagccacttagggcagagcgagcaattcatgcttttttaggatggttgaaaagcagggatatagttcaaccatccatgaattaccttttatttattccccataatgatattaagcgttttctgatcgggcaaccccacggcctgttgtagcgtattttccttactcatgtaatagatagccggcgtgacatttgcccccagatcgtccatcagtttctcattgtcacttaacactttcatttgctctgtacttacgtttgcaggcacgtttagcttaagcttgccaccagaggcttcatattgttgccaggtttttgcgggatctttggaggcaagaattgccgctgctgtcgccgggctttctggcttgataaccccaaccaacaatgttcttaattgcactttgccagaatctacccacgggcgcgcctgctgccagaactgtttacaatatgggcagaacggatcggcgaagacgtagacaatgaccggcgcatcttttttaccgtcgaggagccagtgggattgttccatccgttgccacatttcgcgtccggctggtgcgtaaatttctttttcgataagtgtgttactcaggttttcacctttctcgttgtacatgtaaccagagatagcgtgcttaccatctggagtcaggtagatggtgacgcccatatcctgatactttccgagataacctttcattcctccgggggcatcgaatgttttgatgattgtaatgccctgtttttcaatcgcttttactggagcaggaagttcctctgcgaaggcgattgcaggaagcagagccagtaaaagtatcttttttaacattaatttgtccttttcagtcagtgcaaaagtcgagtaaaaggcataacctatcactgtcataggtaagagcttagatcaggtgattgccctttgtttatgagggtgttgtaatccatgtcgttgttgcatttgtaagggcaacacctcagcctgcaggcaggcactgaagataccaaagggtagttcagattacacggtcacctggaaagggggccattttactttttatcgccgctggcggtgcaaagttcacaaagttgtcttacgaaggttgtaaggtaaaacttatcgatttgataatggaaacgcattagccgaatcggcaaaaattggttaccttacatctcatcgaaaacacggaggaagtatagatgtccttgattaacaccaaaattaaaccttttaaaaaccaggcattcaaaaacggcgaattcatcgaaatcaccgaaaaagataccgaaggccgctggagcgtcttcttcttctacccggctgactttactttcgtatgcccgaccgaactgggtgacgttgctgaccactacgaagaactgcagaaactgggcgtagacgtatacgcagtatctaccgatactcacttcacccacaaagcatggcacagcagctctgaaaccatcgctaaaatcaaatatgcgatgatcggcgacccgactggcgccctgacccgtaacttcgacaacatgcgtgaagatgaaggtctggctgaccgtgcgaccttcgttgttgacccgcagggtatcatccaggcaatcgaagttaccgctgaaggcattggccgtgacgcgtctgacctgctgcgtaaaatcaaagcagcacagtacgtagcttctcacccaggtgaagtttgcccggctaaatggaaagaaggtgaagcaactctggctccgtctctggacctggttggtaaaatctaaatttccttcgtctttcacgccatagcggcgttggcgtcgcccgctcaccccggtcacttacttgtgtaagctcccggggattcacaggctagccgccttgctctgacgcgaaatacttcggaaattcacctaattcttcgggtgctgcggcacccgattttcttccccgcaccatgatgcaagctgcatccaggtagccgcagaggccgcttgcatgatgatgtttaaagcccaggagataaacatgctcgacacaaatatgaaaactcaactcaaggcttaccttgagaaattgaccaagcctgttgagttaattgccacgctggatgacagcgctaaatcggcagaaatcaaggaactgttggctgaaatcgcagaactgtcagacaaagtcacctttaaagaagataacagcttgccggtgcgtaagccgtctttcctgatcaccaacccaggttccaaccaggggccacgttttgcaggctccccgctgggccacgagttcacctcgctggtactggcgttgctgtggaccggtggtcatccgtcgaaagaagcgcagtctctgctggagcagattcgccatattgacggtgattttgaattcgaaacctattactcgctctcttgccacaactgcccggacgtggtgcaggcgctgaacctgatgagcgtactgaacccgcgcatcaagcacactgcaattgacggcggcaccttccagaacgaaatcaccgatcgcaacgtgatgggcgttccggcagtgttcgtaaacgggaaagagtttggtcagggccgcatgacgttgactgaaatcgttgccaaaattgatactggcgcggaaaaacgtgcggcagaagagctgaacaagcgtgatgcttatgacgtattaatcgtcggttccggcccggcgggtgcagcggcagcaatttactccgcacgtaaaggcatccgtaccggtctgatgggcgaacgttttggtggtcagatcctcgataccgttgatatcgaaaactacatttctgtaccgaagactgaagggcagaagctggcaggcgcactgaaagttcacgttgatgaatacgacgttgatgtgatcgacagccagagcgccagcaaactgatcccagcagcagttgaaggtggtctgcatcagattgaaacagcttctggcgcggtactgaaagcacgcagcattatcgtggcgaccggtgcaaaatggcgcaacatgaacgttccgggcgaagatcagtatcgcaccaaaggcgtgacctactgcccgcactgcgacggcccgctgtttaaaggtaaacgcgtagcggttatcggcggcggtaactccggcgtggaagcggcaattgacctggcgggtatcgttgagcacgtaacgctgctggaatttgcgccagaaatgaaagccgaccaggttctgcaggacaaactgcgcagcctgaaaaacgtcgacattattctgaatgcgcaaaccacggaagtgaaaggcgacggcagcaaagtcgttggtctggaatatcgagatcgtgtcagcggcgatattcacaacatcgaactggccggtattttcgtccagattggtctgctgccgaacaccaactggctcgaaggcgcagtcgaacgtaaccgcatgggcgagattatcattgatgcgaaatgcgaaaccaacgtgaaaggcgtgttcgcagcgggtgactgtacgacggttccgtacaagcagatcatcatcgccactggcgaaggtgccaaagcctctctgagtgcttttgactacctgattcgcaccaaaactgcataagaagaagtaagattcacctgcaattgcttagccgccggggtcaaacctggcggcttttttatggcattaaaaagccccgccgggatggctccgggcagggcgggatacttattctggcaattaacgcacaaccagcaccggcagattggcgtggcggatcacgctcgaggcgttagaacctaacagatgggtcgaaatcgatgggttgcgagaaccaataactacaacatcagcccccagttcttctgccaactcattgacttcatcccgcacgctaccaaaacggacatgttgtttaatgcgggaaggatcgatggtgaagtggctgaccatcgtttgcagacgttcttgtgcttcatgttgcagatgctcttcaaaacgacgcacatcagcggcaaaacggtgcaggctcaggctggctgacccgggtagtacgtgaagtagatgaataactccgtcatcctgggcgaggaattcagcgtggcgaacagctttgtcgctcaattccatttcaaatacatcaactggcataatgattgtcttatacataaccctttctccctgttaatcatgaacaaatcattcgccatgattataatatttatccctgatatttgtctggttctttttccttacgaactgtttctgtgatgaatatattctcactgaacaccaggaattctcccaaaacctgtggtaccgcccgttttcccgctgtgatagctacccttaaagactgactcttttttgaactgtctctggaggttgcatgaaagcattgacttatcacggcccacatcacgttcaggtagaaaatgttcccgatccgggcgttgaacaggcagatgatattattctgcgtattacggcaacggcgatctgtggctctgacctccatctttatcgaggcaaaatacctcaggttaaacatggcgatatttttggtcatgaatttatgggggaagtagttgaaaccggaaaggacgtaaaaaatttgcaaaaaggcgaccgagtggtaattccgttcgtcattgcttgtggcgactgttttttctgtcgattgcaacaatatgccgcctgcgaaaataccaatgcgggtaaaggcgctgcgctcaataaaaaacagataccagctccagcggcattgtttggttatagtcacctgtatggcggcgttcctggtgggcaggcggaatatgtccgcgtccctaaagggaatgtggggccgtttaaagtaccgcctttgctttcagatgataaagcgcttttcctttctgatattctgccaacggcatggcaggcagcaaaaaatgcgcagatccaacaaggttcaagcgttgcagtctatggtgctggtcctgtgggattgttgacaatcgcctgtgcacggttgctcggtgcggaacagatttttgttgttgatcatcatccctaccgcttgcatttcgccgccgaccgctacggcgcgatcccgattaattttgatgaagacagcgatccggcacagtcaattattgaacaaacggcaggtcaccggggcgtggatgcagtaatagacgccgtcggttttgaagcgaaaggcagcaccacggaaacggtgctgactaacctgaaactggagggcagcagcggtaaagcgttgcgtcagtgtattgcggcggtcaggcgtggcggcattgttagcgtaccgggcgtctacgctggatttattcacggtttcctgtttggcgacgcctttgataaagggttgtcgtttaaaatgggacagacccacgttcacgcatggctgggagaattattaccgttaattgagaaaggattactgaaaccagaagaaattgttacccactatatgccgtttgaagaggccgcccggggatatgagattttcgaaaaacgtgaagaggagtgccgtaaggtgattctggtacccggtgcacaaagcgcagaggcggcgcagaaggcggtttcaggtctggtgaatgcgatgccggggggaacaatatgatcgtcaggagtggttttcgaggtaaaggacagccatgacgataatcgccgccataatcagaaatcctatcaggatgtaaaatgcttctgccatggttattcccacaaacgaaacggaataattttgcagcaaaagtgaacagtgagaaccaggaaaaattgctgattttgcgtaaagaggatgcgagtgcatcctctgggcaaagcgagttatcgcttgtgcagatgggattaaagcaggtagtcgccagcagcttctggctggtattcgagttccagcacttcaaggtgggttgcaacgccgcccggaagttcccagtgaatggaatcgccaacgcgcagccccagcagtgcggcacctaccggagccataacggaaagctgagtattgctatcggtcatttttgccggatacaccagcgtgcgcacacgcacttcgccatcgctaagattgcggaatttaacccggctgttcattgtcaccacgtcgtgtggcatctcttctggcgaacacatttgggcgcgatccaactctgcgtttaacgcgtcggcgattggcaaaccagcataggcgggttgctccagcagaatatcgatgcgttcggcatccaggtcgttaatgatgatagttggtctggacatttttactccatgtcgtcggtgctgcgagtgtcgcagataaacatacccaaaagaaaaccctcaccgtcaggcggcgagggtttaactcacatgatgatactgactgttgctcactctttgaagtgatttgcgtcacattcagggaattcctcaatgcagcgcattatgtataaatcttaatcgccttggtttatggaagacgaattagcgtgttttgtaaatcagatgattaataacccgctttatcaatcacaaaggttttgccacagttacctgggtgaggttgtggcaagaatgagtttgcagaaagcggagcgttgatggcgtcagctttgatcgagatctgaatttcagtcaaatacgcagggttaccctggcacgttagcttaactgctttcacgttctcttttccccagcttttggcaaaggcggcgtcaaagtcacggcggctcactgttttaccgtaattatccgcaaggaattttccggcttcgctctctttaatttcttgattcaggcgtaccatcgtaccgaagtatgcgtccggatcaaaaccaaagcaggcaccgtgtttggcatattcgtagcgttccaggcaggaacgtccgccagctcctggcatgacttcacttagtttagcggccgtttccagtgataatccggtttccggcgatgaacacattcggctggcgcgcgcttctggtagattcgggattgggcgagtagcgcaaccgaagcgcatccagcggcgttcatcaacaccacgggcagcaaccgatttaggcaatcctggccacagaccatgtacggtcagaaaatcagctttgttggtcgtttcggtttgcaggcgacattcatctcgttcgttacgatttcgatcgtgttgactctggcaaaatccggtttgccaggagagggccaggacatagcgatcaaaatcgccatactgttttgcctgcaacgctaaggcgttggcagaagagaagggaagcagagaaaccgcgagcaacgcggcgttacgccagaatgctttcataatgggtgtggaactcatacatacactgaatactatctattaaatcataaaaaagcccgccaggtgggcttacctggcgggcgtgatgatttattcagcgtttggcgaacgtattagttccacatggcgagaatcggccagccaaccaacagcaacatagagatgtaaatcaccccgaagattgcgccaagacgccagtaatcttttgatttcacatagccacagccgtaaataatcaccccaggaccggttgcatacggcgtcagacagcccatgataccgatagacagcaccagcaggatacacagttgttccattggtacgcccggaatacctttaccgacggccagaataaccggcagcatggttgcggtgtgcgcagacaggctggcaaacaggtagtgtgcaaagtagaacaccagaaccagtacaatcaccgttgcgtttggtgagaatccttccaggtgcgtactcatggtaccggcgaaccagtcaataaaaccagaacgagtcaggccgttagccatcacaaccagagttgccaggttgaccagtgtgttccatgcgctgttatagcgggtaatgtctttccaaggcacaacgtgcagggccagcattagcgaaactgccagcagaccaaccgcagtagcattaatgacttcactgccaaatacccacaaacctaagctgagcaatacaaggccaatcagtgtccactctctgcgtgtcagcgcacccatggttttcagttcatcacccgcccaggttgccacttcttcactgtgtgtgatttccggtttgtacagcacgtaggaaagccacggcgcaatgataagcaagataaccccaaccggcaggaagcagaggaaccactgcaaccagctaatctggataccggcaattttgctgacgaactccagacccagcacgtttggtgccgcaccggtgacaaacatggacgaactcagactggtactaatgaccatcatccacatcaaatagccgccaatacgacgcgcggacggatcgttcgggaatgatttaaacaacggcggcaggtttttaatgaccggaaaaaccgtacccccggtacgcgcggtgttggaaggtgtaaacggtgccagcagaatgtcgataatgacaatcgcataacccaacgtcagcgtgcgtttgcccatgaatttcaccaggaaaagggcaatgcgacgacctaacccggaaacttcataccctaatgcaaaaataaatgcgccaaataccagccataccgtggtgctggaaaaaccagccaggccccatttcagcgcctgtttttgcgcattaaacgctgggtcagctaattctttggcatcaaagagcaggtaattactgccaataacgcaaatagtaaccgcaataaaactgatcgctgttgccggaattggctcgaggatcatgccgacaatcattgccacaaacacagcgaagtaatgccatgcctgcggcggcataccgtcggggacagggataagaaacatgacacccatcaccaccagtggggccaatagtttccatatattatcttttgctaaagacatacgggttctccgaaaattaatatttccaaatttatcaagtgcttaaataattaaatctgtgctaaaaaccaggtaaggatcagtaggtcagcactgccgcctggactgagatttcgttcgatacactccctgtcgaactgccggagataatcgagatcggcgggggttcgaatgccccctttttgcaataatgtttgcgcctcgcgctgtagccagcgcaggcccccctcgccaccgcgcgatgcaacgttggtatcgccgttgatcgccatcagtaggagcaaggtatcgagcaatgccagttcaggatctaacccctgatccagcagagtgaggtaatgcggcaaggcgtgattgatcaccagtggataacccgcttcggcttcaccgcgtgcgccggtaaggccaagctgttggtacaaccgttgacctgccgtcagttgtgaattattggtacgcagttcgcgatcggtcaggccacggcagaaacttgccgccgtagaacaaacggttgttggcgttaccggttggttgagttgaagcaaacggccaattgccgcacatagcagccctaaagaaaaaatgctgcctttatgcgtgtttacgcccgcagtggcgcggaacatatcaccttcgcaagccataccaattgggcgtaatccgtggagtaccgcttctggtgccatttccgcactacaggcaccaaattcaatgaaacggggtagccagccctgaatcgccagcgcgctgcggtggaaatcttccagcgccatatctttgtgcgcaccgcagttaatgcgatccacgaggcctggtttcggtgacagattgacttcagtcagcatggcgcgccagcccagcagggcgtactcatcgattaatgacgtcgcaagctttgtggttttagttgacgttgcaggcatcgacatcgttcagcagtgcctccatgcggttgagtaaatcggtcagttgatgggtttttccacgcgcgcagacggctgcgctttgttcgcacaacaggcagcggcgaggcggcagtgaatagtcgcggcgggagagaatttcgccttcgggcgtcaggacatcgatatcccataaccgcccgagaggatgactatgttcaagctcaatggtggcgagcttgaggtcgcgagccggggcggcaatgctcaacatgccctccggcccgctggcggaaaccagtgcagcctgctcctgaatttgccagccctgttttgcggctaaggcacgcaaggctgtcacgccatgattaaaaattcggcgtgtgacctcgctgtctttaatcggcccaggcgcaaccacggtaaaggagaccagtggaacaggatggcgcttgagccagacgtgttgccgtgcttgcctttcatcccggctgacgagcagctcgggaattgataccgcatggtggctggcgagttcaggaagcaggtgcatggcttattccttcacctgatgcacaacatcgatcaccgagccatcgcggtaacgcacaacggcaacgacgcggtctgtgaattcaatcggctgtggttcaccggtcagcagacgcgcacgttcgcgcagccactcaatggaaaccactttaatgcccgcttcctgcagacgttctgccagttccggacgtgccgggttaactgcgataccgtggtctgtgaccagaatatcgacactggagcctggggtgatgcaggtcagtacgttatccaccagagtcggaatacgaccgcgtaccagcggcgcgacgatgatggaaagcgcagaggcaatcgcggtatcgcagtgaccaccggaagcaccacgcagtacgccgtcagagccggtcagcacgttaacgttgaactgggtgtcaatttccagcgcgctcagtaccaccacgtcgagacgatcaaccgatgcgcctttcgaaccccagttagcgtactggttggcgctgatttcgatgtgattggggttacgggccagcgattgcgcagcatggctgtcaaagctctgcacatccagcagtttgcggatcagacctttttcgtgcaggtcaaccatcgtcgcggtaataccgccaagggcgaagtcggcgcgaatatcgcggctacgcattttgtcttccaggaaacgggttaccgccagcgatgcgccgccggtgccggtttgcatggagaaaccttctttgaagtagccagagttgacaatcacatccgcagcgctacgggcaataagcagttcgcgcgggttagtggtcatacgggtcgcgccagcgccgatttttgcagcatcgccaacgcggtcaactttgacgatcaaatcaacctgatcttgctcaatgcttgccggattatgcggataaggcagcagttcttcggtaagcatcacgacctgttttgcgttgtcggcatcaactattgcatagccgagggagccgcagcaggctttaccggtgtagccgttggcattaccgaattcatcacaggacgggacgccgaggaaagccacgtcgatattcagttcgccgctctgtaccagatgcacacgaccgccgtgagagtggatctgcaccggttctgccagcagaccacgggagatctcttccgccagtggaccacgcaggccggaggtataaatgcgggtaaccacgccctggcgaatgtgttctaccagcggcgcatggcaatcactcagggagctggacgccagggtcaggtttttaaagcccatcttcgcgatgacgtccatcaccatattgacggtcaggtcaccgccacggaaagcgtgatggaaggaaaccgtcatgccgtcctgtaaaccagagcgacgaatcgcttcttccaggttggcgcacagtttgcgatcgcgcgctttttcagcctggtaggtttgctttggcgagttctggaaagcggcaagatcgcattcagcgcgacgattccaggccgctacccgttcttgtcgttgagattgttcaattttctgcgtcattttgattgccttattcttcgcggatgccggaaagttctgcacgggagagcaccagacgggcgcgatcgataaccggaccgtccaccatcttgccgttcagggaaaccacgccgaggccttcgcgagcggcggcttcagcggcttctacgacgcggcgggcgtgatccacttctttctgggtcggtgcgtagaggttgtgcagcagatcaatctgacgcgggttgatcagcgatttgccgtcaaagcccagctgtttgatgtgggcggcttcttgcagaaatccggcttcgttgttagcgtcggaatagacggtatcgaacgcctgaatacccgcagagcgcgcggcctgcaaaatggaacagcgtgcgaacagcagttcagttccttccggggagcgttctgtacgcaggttgcgcacatagtcttctgcaccgagggcgataccgatcaaacgctcggaagcgtgagcgatttccactgcgcgggtaatccccagcggagattcaatcgccgccagcaggccggtgctgccgggttcacgaccacaggctttttcgatacgcaggatctctttttcaatatccagaacatcctgagcggtatcggttttcggcagacgcacaacgtccgcaccaccgcgaacgacggcttccaggtcgttaacaccccattcggaatccagcgcgttgacacgcacaatggtttcaatatcgcgatacagcggatgttgcagcgcgtggtaaaccatgcggcgggcggtgtctttttcacgcaatgctacggagtcttcgaggtcaaacatcagggcatcagccgggtagatgaaggagttgctgaccatcgcggcattggcaccaggcacaaacaacatgctgcggcgggtgcgagttttacgttgttgcagcgaagcggaaatcattggcaatcctcccatggcagagccgggataccgctggcgcgtgccagcagggcttccagtcgtgcacgtaaaatgcagtccagtgcgcctttgtcatcgacattcagctgtacgccgcgcacgttgtagcgggcgagaacgtccagaatggtggtgcgaattgcatcgccaaactgtttctcaacgctgctattgatttgcaggtcgatatcctgcgtatcgagtggggcgatgcgtatcatcacatccccagactcaagggtgcctgcaacggcgggctggtttattttcatttttcacctgtttctcatgcgggggtcttttgacgagctgccgcgtcctggcgggagtgctcaagcaggttctgcaaataatgcagcgtgactgcagggaccagcggcgcgatagccgtgagatcgtttttcgccagcagttgacgtacccgggaagcggatatcggcatctcctggtaacgcagccgctcaatttcaaccagttcgatgggcggtgcggagatagtcggcgtttccagccagtagcgcatatcctggttgtactgggcggtaacgcgacaaaagggttcagtaccgacaaagcggtgagttacacccagcgcgggagcgaggtactgacggaaaatcttcagatcaatttcggtgtaacaatggttaatgacgctctgttctttaatgaagtagcaagggaacgtagcgcgggagatgatgtattcggagccacgatgcacagtcaggcgtggaatatcggcggtgccttttaacaccaaatccagccggtcttcataggggaagcgtgaagaatcttctttgactaaaaacagatgcaaccagtcgcactgtgccgcagcctgttgaatcagataacggtgaccattcgtaaagggattggcgttcatcacaatgcagccaatcttgttccctggatgacgaaattttttcagcgattcggcatagcgtttcagtcgcgtggcgctgttttccatcagcaccatcacgccgggtacgctggtcagcgtggaaaaaccgcactggcggaacagcgcctcgtattcggttttggtataaataaacagatgcgtgctgtgccgctcataggcgaggtttatcaattcagtggctaatgtcagcgccagtccttcaccgcggacggattcactgatagcaacgcatttaataatatttccggcaattccaccgcacgcgataagcttttcatcgcgggttacggtaataaatacttcgactgtggtgtcaacgctcaaatcattttcatgcaggaattgggcgatttccgccatttttttattttctgaacgttttacgcgggtgaaaatatcattgccgaacataataaatagtatcctgaaggtgcatgttgttatcgatttgcaacgaatgttgttcaatgttgcaaactgataaccttttattttcacttgggagaaagggggtgatcgaggtatatctttttctcctttcgctatacatcctaaggagtatttcggcgtgaaattttgatttatttcacatagagttagtggttttttatttatttaatgattttaagttttttaattaatgtaattacgaaatgactcgcaggtttaagtgatttaattgatttaatgaataaaatttgccacgatcataattaatatctatgtattttgattcaacattttaattacatccgtcaaagaggctcgggacaacccgcaaggaaaacaatgttgcagcttaacgagaataaacagtttgcatttttccaaagactggcatttccgctgcgtatctttttgctgattctggtgttctcaatatttgtcattgcagccctggcgcaatattttacggccagttttgaggactatttaacgcttcatgtacgcgacatggcaatgaatcaggcgaaaattattgcctccaatgacagtgtcatctctgcggtgaaaacgcgtgactacaaacggctggcgaccatcgctaacaaattacaaagagataccgattttgattatgtggtgattggggaccggcactcgatccgcctttaccatcctaatccggagaaaattggttatcctatgcagttcaccaaacagggcgcgctggagaaaggggagagctacttcattaccgggaaagggtcaatggggatggcgatgcgcgccaaaacgccaatctttgatgacgatggaaaagtcatcggcgtggtgtcgattggctacctggtgagtaaaatcgatagctggcgggctgagtttttattaccgatggcaggtgtgtttgtcgtgctgttagggattctgatgttgctgtcgtggttcctggccgcgcatatccgtcggcagatgatgggcatggagccaaagcaaatcgcacgcgtggtccgtcagcaagaggcgctgtttagttcggtttatgaagggctgattgcggtggatccgcatggttacattaccgccatcaatcgtaacgcaagaaagatgctggggctgagttcccccggacggcaatggttgggtaaacccattgttgaagtggtcaggcccgccgatttctttaccgaacagattgatgaaaaacgtcaggatgtggtggcgaactttaacggtctgagcgttattgccaaccgggaagctattcgttcaggtgatgatttgctgggggccattatcagctttcgtagtaaagacgaaatttccaccctcaatgcgcaactgacgcaaataaaacaatacgttgagagccttcgtacattgcgacacgagcatctcaattggatgtcgacgctcaatggtctgttgcagatgaaagagtatgatcgcgtgctggcgatggtgcagggggagtctcaggcccagcaacagcttattgacagcctgcgcgaggcgtttgccgatcgccaggtggcggggctgctttttggtaaagtgcagcgcgcccgggaactggggctaaaaatgatcattgtccccggtagccagctttcgcaactgccgccaggactggatagcaccgagtttgcagccattgtgggcaatttacttgataacgccttcgaagccagcctgcgtagcgatgaaggaaacaagatcgttgaattattcctcagcgatgaaggcgatgatgtggtgattgaagtcgccgatcagggctgcggcgttccagagtctctacgagacaaaatatttgagcagggggtcagtacgcgtgctgacgagcccggtgaacatggcattgggttgtacttgattgccagctacgtaacgcgctgcggtggtgttatcactctcgaagataatgatccctgcggtaccttattttcaatctatattccgaaagtgaaacctaatgacagctccattaaccctattgatcgttgaggacgaaacgccgctggcagagatgcatgcggaatatattcgtcacattcccggattcagtcagatattactggcgggaaatctggcgcaggcccgaatgatgatcgagcgttttaagccggggctaatcttgctcgataactatcttcctgacggtagagggattaatttactgcatgaactggtgcaggcgcattatcccggcgacgtggtgtttaccactgcagccagcgatatggaaacggtgtctgaagccgtacgttgtggtgtatttgattatctcattaagcccattgcctatgaacggctggggcaaacgctaacccgtttccgccagcgtaaacatatgctggaaagtattgatagcgccagccagaagcaaattgatgagatgtttaatgcttatgctcgcggtgaacctaaggacgagctaccgaccggcattgaccccttgacgctaaacgcggtgcgaaaactgtttaaagagcctggtgtgcaacatacggcagaaacggtggcgcaggcactgaccatcagccgcaccactgccaggcgttatcttgaatattgcgccagccgccatctgattattgctgaaattgttcacggcaaagttggcagaccacaacgcatataccacagtgggtgacatgataaagccggaggaaacttgcctccggcattactatttacttgcctgtgaccgctgctgccgttcctggcaccatcagctctgtagcaacgataacaatcaccaaaccaacaagcaccggtaccgaggtgcgttttacgacttcaaacggcgagatcttcgccatcccggcaaccgcaacgactacgccagaaacgggcgaaagggtacggccaaggtttgacgcctgcagcatcgggatagtcaaatacgccgggttaatgccggaagagtgcgccagtttcgggatcatctcaacaaacgcataaaacggcgcattgcctgaaccggtcgtgactgccgccagcattgtcagaatcaccaataccagcatcaggatgatactcgccgaaccaaacgaggtagcgatagaaatcagactttgaataaagccgatggtgctaagcccctgagcgaataccccagcggcaaccagcagcatcaccacgttagcaaacgcatctgccatcccgcgataagccacttccagaccagagaaaactttctgggtattaaagctgcggaggaactccagaatggaggcaatcagcatacaaatcaccagaatagtgatgatgtgtaattgcggaccccatttaccgtcaaaaatcagtacaccgatgatcggcgtgaacggcaaaatggcataaaacgcaggagcagtggtggtgatttcactgacatctaacatttcatgagagatgtgctcttttttatccagataacgttgccagaagaagtgggcgatcgccatgccgataattgcagcaattgagataggcagcgtcgttttgaaggcgaagtcaatcagcgacatttcggaagcttgcgccgccagcaccacatcccctgaagtcggtgcgagaataatcgccgccggggaggcacaaatggcagcagctgcgccacgactgataccaacgtttaccatcaccggaaatagggttgccatcagcaaaacacccagaccggttgcggaagagacggccagagacatcagacaggcgacaaaataggcggcaatcatcagcaggtaaggggagttaatatactgcaatggttttgacgccagcttgaccaccatatcattcgcgccgatatgggtcatgtaagcggcaaatccacacagcatcataatcatcatgccgaggtcgccgccgcggctcattagtaatattttaacgtattcaacgatatccgtggcgctgtagcctgttgaagcctggctggacggtaacactttgtgccccataatggcactgataatcagcaataacaggccaccgacaaataacacaccagtggcggaataccctttaatgatgtagcgagctacacccacaataaccacaaccccaataaggagctcaatgaatgtcagcataatttttcctgtctccaggccccaaagtaaataataaaaaattcctaaagcttaaggaaaaaatatgcccaataaattggcgatgaatgctgattaaaatcaagaaaaactgccattaagacattgaagttgctgtttttatacatagataacaaaacgcatatttagcggttggcaattatcacataataatgtgtgcaaattgatggtggattgatgcaaatttgttaattgcaatggtgttagctgcggctgtgcgctcaaaaaataatctaatatgagcataggttgacgatatatattatatacttcgttaagatgattgttgtatctcgttaaaaaataaaataatttttccttgattgcattttgtcatcaaaaaagacttggtttttcttttttgactattcccatcgcagaaaacgacgcatcatctttaatcgatgcgcggaaatatttaacttgaacaagcggaaataaatagagcagctattcagattattctttatgttgggtctattaaggttatgttaattgtagctttgctatgctagtagtagatttttgataaatgttttatggtcacaaatgaacgtgagtaaatatgtcgctatcttttcctttgtttttattcagttaatcagcgttggtaaagtttttgctaacgcagatgagtggatgacaacgtttagagaaaatattgcacaaacctggcaacagcctgaacattatgatttatatattcctgccatcacctggcatgcacgtttcgcttacgacaaagaaaaaaccgatcgctataacgagcgaccgtggggtggcggttttggcctgtcgcgttgggatgaaaaaggaaactggcatggcctgtatgccatggcatttaaggactcgtggaacaaatgggaaccgattgccggatacggatgggaaagtacctggcgaccgctggcggatgaaaattttcatttaggtctgggattcaccgctggcgtaacggcacgcgataactggaattacatccctctcccggttctactgccattggcctccgtgggttatggcccagtgacttttcagatgacctacattccgggtacctacaacaatggcaatgtgtactttgcctggatgcgctttcagttttgagacaaatgaagttttagtaacttctttaaaatcaatagctaaaataagtaacatcaaaaataacgcgacttttatcactttttagtaaagttacactggacaaagcgtaccacaattggtgtactggtaaccgacacagcatttgtgtctatttttcatgtaaaggtaattttgatgtctaagattaaaggtaacgttaagtggtttaatgagtccaaaggattcggtttcattactccggaagacggcagcaaagacgtgttcgtacacttctctgcaatccagactaatggttttaaaactcttgctgaaggtcagcgcgtagagttcgaaatcactaacggtgccaaaggcccttctgctgcaaacgtaatcgctctgtaagatacgtcagcaagaattcaaaacccgcttaatcagcgggttttttttggtctttagtgtgcggttgaggccgaaaacagccagaatgccagtgcggtcatggcaaaagaccccagaaggttgacgaaaacgttcagtaatgcccagccaaagcggccctcttgtaacaaaaacaccacttctgccgaaaatgttgagaaggttgttagaccgccacaaaatccggtggtgattaatactttccacactggatcaatgttcgtcatcctgctgaaccatgcgaatcctattcctatgatgaatgccccaatcaggtttgctgtcagcgtccccaacggaatcgcctgatgcagtgggttaaatcgcatacttaacagccatctcgccacgcttcccgtaccaccgccaataaaaactgctaaaagaagttgtaacactgcaaaatcctgctatttgatttgtatgagtgataagtgtaacgccgaataatcgtcgttggcgaattttacgactctgacaggaggtggcaatgctggttgccgcaggacagtttgctgttacatctgtgtgggaaaagaacgctgagatttgtgcctcgttgatggcgcaggcggcggaaaacgacgcatcgctgtttgccctgccggaagcattgctggcgcgcgatgatcatgatgcagatctatcggttaaatcagcacagctgctggaaggcgaattcctcggactttacggcgagaaagtaaacgtaacatgatgacgacaattctgacgattcatgttccttcaacgccggggcgcgcatggaatatgctggtggcacttcaggcaggaaacatcgtcgcccgttatgccaaactgcatctctatgatgcatttgccattcaggaatcacgccgtgttgatgctggtaatgaaatcgctccgttactggaggtggaagggatgaaggtcggtctgatgacctgttatgacttacgctttccagagctggcgctggcacaggcattacagggagctgaaatcctggtacttcctgccgcctgggttcgcgggccgctcaaagagcatcactggtcaacgttgcttgccgctcgtgcgctggataccacctgttatatggtggcggcgggggagtgcgggaacaaaaatatcggtcaaagccggattatagatccctttggcgtcaccattgcggcagcgtcagaaatgcctgcactcattatggcggaagtgacgcccgaacgtgtgcgtcaggtgcgcgcgcaactgcccgtcttaaacaaccgtcgctttgcgccgccgcaattattatgatgtttttttactcggcgcttgattcaccttgttacagattgctattgtgtgcgcgcgtcgaatgaccgttaatattctctggtttttaaggcgcgttctgttgccggttatatgtcaagaaggtatctatgggtgagattagtattaccaaactgctggtagttgcggcgctggtcgttctgctgtttgggactaagaagttacgtacgctgggcggagaccttggagcggccattaaagggttcaagaaggcgatgaatgatgacgatgctgcggcgaaaaaaggcgcagacgttgatcttcaggctgaaaagctctctcataaagagtgacgtggcgagcaggacgctccctcaatatcttgttcgatacaaaaaacccgcttcaaaaagcgggttttttatcagacagatgtaagtaattattacaggattacttaacttccatccctttcgcctgcaaatcggcgtggtaagaagagcggacaaacggaccgcatgcagcatgggtaaagcccatcgccagcgcttcggctttcatttcgtcgaactcatccgggctaacgtaacgttgaaccggcaggtgatggcggcttggctgcaaatattgccccagcgttaacatcgtcacaccatgacggcgcaggtcgcgcattacctcaataatttcttcattggtttcacccagtcccaccatcagaccagacttggtcgggatttccggatgcgcttctttaaagcgttccagcagcttcagcgaccagttgtaatctgcaccaggccgtacctgacggtaaatacgcggtacgttttccaggttatggttgaacacatctggtggcgttgcagtcagaatatccagagcacgatccatacgaccgcggaaatccggcaccagagtttcaattttgatttgcgggcttttttcccgaatggcagtaatgcaatccgcaaagtgctgggcaccgccatcgcgcaggtcatcacggtcaacggaggtgataaccacataacgcagcgccatatcggcaatggtctgcgccagtttcactggttcattggcatcaggagctaccgggcgaccgtgggcaacatcacagaacggacaacggcgggtacaaatagcgccgaggatcataaacgttgctgtgccgtggttgaagcattccgccaggttagggcaggaggcttcctcgcagacagaatgcaggccatttttgcgcattgcggctttgatgccctggatacgtgtagagtccgctggaagcttgattttcatccattccggcttgcgcagcagggcttcgcgctctgttgccacgtttttaaccgggataagggccatcttatcggcatcgcggtatttaacaccgcgttccatcacaatgggtttactcatagcgtgcgtgttccagttgcgaattacgaaggaaagcgtttcaattcaatagattgttgtaattatcaactatttttgaattaacgactggcagtatatcattgaaacggacctgaaagcagccaaagcggtcgcgaaaatgtaaaattgttgttggattgtgccattttatcgttctgcgctgtgatctggctgtaacaatactttttcaaaatgcattacggataacatctattactccgtgcaggatgggatcacgcaggctgaatttgttgtagtggatagagaaatctatttgctcctcatttaaggacggaaaaggcagtttttccagcggccagcagcggctaaacaggttataaaaacggctgggaataatcgctaacatgtcactgttggcaaccagtgcagcgattgtcaaaatgttgtagctggtgaaattgatttgccggtccggaaacatttcttgaactctctgccgcagaccgctgaaattttgctcttccggtaacagaagtacatgcgcagcgttgtcgatagtctctctgtcatcttctaaagagagtagtggatttccctcgcggcaaattaacaccatattgtcggtgaacagaacatgatgttgcaccgtacgattggtgcaaaacatgttatcgatgatgagatcggtttgaaactgactgagttggttttccgcgtcgctgatgggcgggttgcgcagtaaaagctgcggatagtgagttttaatcgcccgatagatgacaggaaggaccagtgctccgaccgagggagtggtcgcaatagttatcgttcgttgcttatcatagcttccttcgatatccagcgcgccaagaatggactcaaggccctgactgatatactcatgtagatgcatcgcaaatgcggtaggagtgacaccctggcctttgcgaataaacaatgggtcagggaatataacgcgcagtttctgaatagactgactgattgccgagggggtcagattaagcactttcgctgcattaacgatccctttatgtacatatacagcttcaaaaatagtcagaaggttaagatcaatatttcgtaaggttgtaaatatttgtggtttaccttctgacgactttctgcttaaacagggttcaatttgattattactatccacgcacttactccaattttattcatggaaaaataatatttaaaaaattacaataatcttatgtctaattggaacggaacgcttttgctcaccataatcaactatttcaataggttaatcaatggggtgagttacggagcaaggcgtggcaccgcatttctgcaagtgataaagaaaatatacaaacgcgaaggagatgtaaagcattagcagatattatgagtaatgacccagtgtaaattgggccattgatgtatggaattaagcggtaatatattcgaagtccggattgtttagtagcgctaaaatattttccagtaaacgtggagcaatattattagtcgtcgcttcgggtttccattgtgatattttagccatttccattccggcatacccacaaggattaatacgtaaaaatggtgaaagatccatattgacgtttaatgccagaccgtggaatgaacaaccgcgtcgaatacgtaaacccagtgagcaaattttcttttccccaacatagacacctggcgcgtcagcccgaggatgcgcttctatacccagttcagccagggtattcaccactgtttgctcaagcaaggtcaccagttcacgcacaccgagtttacggcgtttcaggttaagcaacacatacatcacctgttgccccggcccgtgataagtcacctgcccaccgcgatcgctctggatcaccggaatatcacccggcattaaaatgtgctccgcttttcctgcctgaccttgggtgaataccggatagtgctcgaccagccagatttcatcaagggtactatcatcgcgggtatcggtgaattcatgcatagcctgggagattggctcgtaaggctgaagaccgagctggcggacaagaattttatcctgatacaaaacggcatctccgtggagaatgagtaaaagtgggggaaaagtatatcacagcgaggagaggggagttacccgaccaggagccgggtaacggagaagcgagttacagaaccatgcggacaatatcgattttgcccagttcttcatacagtgtttcaacctgctcgatatgagtggcgttgatagtgatagataccgagtggtagttgcctttgctgcttggttttaccgttggggtgtagtcacctggcgcatggcgctgtaccacttcaaccacctgatcaaccagctcaggtaacgcctgccccataactttgtaagtaaaaggagtagggaattcaagcagttcgttaagtttggttttcatgtcagctccggcgtaacgtaattaaatagcaactcccgccagaaggcgggagttttttactgatgcttagtatatggggacggaaattacactttcaagtgtttaatttttaaccaaaccagtgatggaacattaatttaatgtaatcaatgattttgccgaagaagttaccttccgggatttcttgcaacacaaccagcgggcgttgctcgatcgttttgccatcaagctggaagttgatagttccgacgacctgattcttttgcagcggcgcatgcaattcactgctgttcagcacatagctggctttcagatctttcatgcgaccacgcggaatggtcaggtacacgtctttatcaacccctaacgaagcgcgatcagaatcaccaaaccaaaccggttcagaggcgaactctttacctactttcagtgggttaacggtttcaaagaaacggaagccccaggttagcagttttttactttcggcttcacggcctttaaaagtacgtccgcccattaccgcagaaatcaagcgcatctggccttcagtcgcagaagcaacaaggttgtaacctgctttgtcagtgtgtccggttttgatgccgtcgacattcaggctgttatcccataacaggccgttacggttcagctggcgaataccgttaaacgtaaattctttttctttatagatcgagtattcattcggtacgtcacggatcaatgcctggccgatcagcgccatatctcgcgcggagctgtactgaccatcagcatccagaccatgtaccgtctggaagtgggtatttttcaggcccagtgcgttaacgtagctgttcatcaagccaacaaaagcgtcctggctaccagcggcaaaatcggccatggcgacacaagcatcgttacccgattgcaggttaataccgcggatcagctgagaaaccggaacctgcatgcccggtttgaggaacatcagcgaagaacctttaaacaccgggttaccggtggcccatgcgtcgttgccgatagtgactaaatcagtttctttaaatttaccggctttcattgcctggccgataacgtaactggtcatcattttggtcaggctggcaggatcgcggcggacatctgcgttctgttcggcgagcactttgccggagttatagtcaatcaggatgtaggactccgcatcgatctgcggtacacccgggatcatagttttgatattcaggtcatcggcatgtgcagcagagataaaggctgtgcaaagagccgtggtgagcgccaggcgcttcatgatacgagcggaaaaaatggtattcatggtctgaactacgacatccgtgatggaattaaaaaagtgccctactatagcaaatgcactaccggcaggcatctgactttccgcgtgactttgttaacgtcatttacagaaattgacacatcagatgcctgctttacgctactgcgcggtagtaataaatgactgtaattgggcttcggtttgcaaacgttgctgcaaggtactggcttcggctttgctggcgaatgggccaagctggatccgccagaccgcgccattttgagttacgcgaccggggacgccgaacttctgtcccagttgctgttggtactgttgcgcacgagcctgatcgcttacggccccgacttgcaccataaagttgccgctggcgctttgcgagacggcttgcggtgtcaccattgcaggcgaggttgcaggcgttgtcgacggagctgtaacaacgggctgtggcgcaggcgtcggttcgctgccttccagtacaccaggcgctaaggtcgttggtgcgccgaggaaaccgctactggttaccggcgcgccggtcggatcttcgctttttagcgtcgaattactgaccggaagaatgtcaccctgcgggccagacactgaacttgttcccgcgccaccgcttaaatcgggaggtgcaggcagggcgtaagtctgtttggcgactgtggtacaagccataccaggaccagaaagcgaaccatcctgggcaacaataatcggatcgatacgaactttggtgttgtttgacgtgttaagacggtcagctgccgcgcgagaaagtgaaataacgcggtcgttgccgtaagggccgcgatcattaatgcgcaccacgatcattcgcccgttagccaggttagtgattctggcgtagctggggatcggaagcgttggatgggctgccgtcagctgtgtcggatcgaatgcttcgccagaggccgtcaggttactgccgggttcggcatcatagattgccgccagtcccgcctggctaaatcgagacggatcctgcacgattttgtagcttttaccgtcgcgctggtaatcctgatttgccgtcgcgttcagtggttcgaaacgcgggtccgccccgctaatttcaactatagggccgttacataccgcaggctgcggtacacttaccgtctgttgctgaccatcatcgcttgtacatgccgcgagcattcctgccgcgatgcagatcccgagccactgcttacgcattgcgcacctcttacacgcttttcgacaacattttcctgtgggtgtggattgacattacaatcccgaacccagccatcagcacaattagcgccgatcctccataactgaccagtgggagcggaacccctacaaccggcagaataccgcttaccataccaatatttacgaagacataaacgaataatatcagcattaagccgccagccatgacgcgaccaaaggtggtttgcgctctggcggctatccacagcccgcgcatgatcagcagaatgtagagagcgagcagaatcagaatgcccactaatcccagctcttccgccagtaccgcgaagataaagtcagtatggcgttcggggagaaattcaagctgtgactgagtgccgtgcagccagcctttgccgcgtaatccgccggagccaatagcaattttagactgaataatgtgatagcccgcgccgagtgggtctgattccgggtccaggagcatcattacgcgctggcgctggtaatcatgcatcaggaagaaccacagaatcggaatgaacgccgctaccagcactactgcgacgccaatcagacgccagctaaggccagagaggaacagtacaaacagaccggaaagcgcaacgaggattgatgttcccaggtcaggctgtgcagccaccagcagcgtgggcataaatatcagcaccagcgcgatgccagtgttcttcaacgatggcgggcaaacgtcgcggttgataaagcgcgcaaccatcagtggtacggctattttggcaatttccgacggctgaaaacgaacaataccgaggtccagccagcgttgagcacctttagagatggcaccgaaagcatctaccgccaccagcaaaataatacagatgatatagagatagggggcccagccttcataaacgcgtggaggaatttgcgccatcaccaccatgatgaccagacccatcgcgatttggccgattttacgctccatcatgccaatatcctgaccgctggcgctccagataaccagggcgctgtaaaccagcaatgccagtaagatcagcagcattgtgggatcgagatggactttatcccagaatgtttttttattcggattatccgtcatgattaatggtcctccgctgcggcaaccgctggattttccgcaggcagatcggtgttgttatcacccagcataatgtggtcgaggatctggcgcatcagtgtaccaaccgccggacccgcaccaccgttctccagaatcatggcgacagccacttgcggattgttgtatggcgcaaaggcggtcatcagtttgtggtcacgtaaacgctcggcaattttgtgcgcattataggtttcgttcgctttcagaccgaagacctgagcggtaccggatttcgccgcaattttgtacggtgcgctagcaaagtatttatgcgccgtaccgttagggcggttagcaacaccgtacataccgtctttcgccagctcccagtaaccggaatgaatatcgccgacgggcggttcatgcggctgtacccatggcacctgtttgccgtcttcggcggtgctcatcagcaaatgaggaaccttcacgataccgtcattaatcaggatcatcagtgccttactcatctggattggggtcgctgtccagtaaccctgaccgataccaaccggaatggtgtcaccctgataccacggttttttaaagcgtttctgtttccattcgcgggtaggcatgttgccggaacgttcttccgccaggtcgataccggtgtaatgaccataaccgaatttacccatccattcggagaggcgatcgatccccatatcgtaggccacctgatagaagaaggtatccgcagattcttccagcgatcttgtgacattcagacgcccgtggccccattttttccagtcacgataacgtttttccgaacctggcagttgccaccagcctgggtcaaacagcgtcgtattgcgcgtgatcaccccggcgctcaatgccgaaaccgccacatagggtttaactgtagacgcgggaggataaaccccctgtgtggcgcggttcaccagcggtgtattcggatcgttcaacaaggcggaataatctttgctggagataccgtcaacaaacaagtttgggtcataactaggcgtggaaaccagcgccagcaccccacctgtacgcggatcggtgactaccacagctgcgcggctacccgccagcagcgtttcaatatattgctggagtttgagatccagcgtcaggtaaatatcgtgtccggcttgcggtggtacttcttttaactggcgaataacacgcccacggttgttaacttcaacctcttcataaccggtctgaccgtgcagcacatcttcatagtaacgctcaatgcccagcttaccgatatcatgcgttgccgcatagttggccagtttgccgtcattattcaggcgttcgacgtctttatcgttgattttcgacacatagccgatgacgtgggtcaacgccgaaccgtaaggatagtaacgacgtttatagcctttaacttcgacacccggaaaacggtactgattgacggcaaagcgagctacttgtacttcggtcaggttagttttcaccggaatagaggtgaaacggtgtgaacgtgcgcgctcttttcggaatgcagcaatatcgtcatcggtcagatctaccacgctgcgcaaagcgtccagcgtttgctgcacgttatcgactttctccggcatcatttctatctggtagatagtgcggttgagggccagagggataccgttacgatcgtagataatgccgcggctgggcgcgataggcaccagcttaatgcggttttcattagagcgggtctggtagtcggtaaagcgaacaatttgcagattatacaggttggcgataagcacgccggtcagcagcaaaatccccaaaaaggcgaccagcgcccggcgcacaaacagcgcggactctgccgtatagtcgcgaaaagagttctgtagtttcatccgctgcgttttctactcaaagctcccttatcactcacggtgataaggatggttggtggtgatgctccacgcccggtacagactctctgcgaccagcacgcgaaccagcggatgggggagggtaagcgccgacagcgaccagctctgctcagccgccgctttacaggcaggcgacaacccttcaggcccgccaatcagtagactgacgtcgcgaccatccagcttccagcgttccagctcagcggctaactgcggcgtatcccagggcttgcctggaatatcgagggtgacaatgcggtttttgcctgcggccgccaacatctgctcaccctctttgtcgagtatgcgcttgatgtccgcattcttgccgcgttttccggccggaatttcaatcagctcgaagggcatatctttcggaaaacgacgcaggtactcggtaaaaccggtttgtacccagtccggcattttcgttcccacggcgacaagttgcagcttcacgcattaactccagagtttttccagttcatacaggcgacggctctcttcctgcatgacatggacaatcacatcgcccaaatccacgacaatccagtcggcgctgttttcaccttctacgccgagcggtaacaggcccgctgcgcgagactcctgcacaacgtggtcagcaatggacataacatgacggctggacgtacccgtacagatgatcatgcagtcggtgatgctggatttgccctgaacgtctaaggcgatgatgtcctgacctttgaggtcatcaattttgtcgataacaaaatcctggagtgctttaccctgcaagttttccccctgggtgaatcaaatagataaaaatggtctgtcagtatacctgaaccagaggcgatttcgggacaattgtcgccgaatcggctttcgaaagtgggctatcatcccaccccgcgccgcagattgcatcgccatttttgtaaaacaatttctacaaagtcgtgtctggcggaaaaagtctggctgcggagaatatcagcctgcccgggtctgtcaatggtcgttgcggcttacccgtaaaaaaacagaaaagtcatgcattctcgaccccgatggcacggctattgaggacgcgtagcgtcgcgaatttttggttgatatcaatggcgctccaacacccctggtcaacgcgaaaatgccacatagcttcggcaggcatgccaattaaacgggcgattaacagactcagtacaccctgatggctgacgactaaaatattctgatagtgctgaaattcactaagccttgcgataaagcgttccacacgttgcgaaaatgcctgaaatccttcaccgttcgtggggattgcatgctgccagtcattgcaccacgcgctatagttttcggcatcttcttgcatgaggtcgcgatgatgtcgcatctcccagtcgccaaaaaacatttcgttgagttcaggtatgatttgcacggggagctggcggtcactgagaaccagtcgcgcggtatgctgtgcccgttccagttcactgcataaaaccagatcaaaggaaacaccatgtagcagcgtatgcagattttgcgcttgctcaataccgcgcgcggtcaggggggtgggcgcatgaccgctgtaaagaccatcgatattcgcttgcgtttcaccatgacgaattaaccacagtcgcatcatgccctccgtaacgacaggtatcagcgatacaagccttgttggttaatgtaagtcagtaccggttccggcaataaatcctcacatgattcaccgttttgcaaacgttcgcggatgatggtcgccgagatgttaaaccacggcgtttcagccagataaattttaccggcaggctgaaggtgaagatcttccgggttatgtgtcaaatgatcttccagccattgctggtattgcggttgcgccatttcaagtgggtaacctggacgccgacagacgatcaaatgtgcattgtcgagtatcgtttcgtattcgtaccaggtcggaaaggtcagcagtgaatcctgaccaataataaacgccagcggcacgtccggtccttgttcctgccgccactctttcagtgtttgcgcagtgtaagagggggcattgcgctttagctcgcgttcatcaagagtaaataatggcttgtcggcaatcgccagttcaagcatgtgtttacgctgcacgctgttcgcttccggctggggacgatgcggaggaacattattagggatgattgtgacccgcgtcagaccaatcaaattcgccagcgtttccacgggttttagatgaccatagtgcaccggatcaaaggtgccgccaaacagagcctgtaaagatttcatatcaaccgtcgataaatacgtccgccaggggtttatggcacaacagaagagataacccttccagctctgcccacactgactgaccgtaatcttgtttgagggtgagttccgttcgtgtcaggagttgcacggcctgacgtaactgcgtctgacttaagcgatttaacgcctcgcccatcatgccccggcggttctgccatacccgatgcttatcaaacaacgcacgcagtggcgtatgggcagactggcgtttcaggttaaccagtaacaacagttcacgttgtaatgtgcgcaacaaaataaccggttcgctgccttccagacgcagttgctgaagaatatgcaatgcgcgcttactttttcccatcaacaaagcatcaacccaatgaaaaggggtgaaatgcgcggcatcattcaccgcctgttcaacgcgcggtaatgtcaatttgccgtctggccagagcagcgataaacgctccagtgcctgagccagcgccagcaggttaccttcataacagtagcagagcacctgatttgccgcgtcatccagttctaagttgagctgttttgcgcgcgcagcaacccagcggggaagctgagcctgctccggtgtctgacaggtcacctgcacgctgcgattcgcaagcgcagtaaaccaggcggcattttcttgcgctttgcttaatttattaccgcggacgatcaacagcaggtcgtcatgcagaagtccggtgagtgtgagaagttgctcattgatcgccgcattcggtccgttttctggtaacaacagcaatagcgtttgtcgactggcaaacagactcatagcctggcataacgaaaagatcgcattccagtcagtgttgggatcaatggaaaaagtgtggtgttcttcgaatccttgtgccgcagctacctgacgaacagcgtcctggctttcctgcaataacagaggatcgttaccaagtaaaagatacgccgcgcgcagcccttcattgagctgcgcgcggagttgttccgggtacaaccgaatcatcagttacccagcgtggtggagacgcgtgcaggcgttgccggagtatccgttgtggtcgacgtctgttcttcgtcggaacgaatatccgcagcacggatgcttggcagcttacgaatcagctgttcggcagcacggtcgtacatctcttttacgatcatgtcttgttcgttatctttcgctaacgccatttgcgggttatcgaagaacgaacggaagactttggcgctaatcgggtagatatcacggccggggatcaacacggtcgcattaaccgtcatgatcatctgatactctgctgtttgaccgttacggaataccgatgcggtatctttcgcgatgctcactttacccaaacgcaaggatggaacgtccttacgcgtggtttctttatcaagcaactcgacaccattcagacgtaactggttacgcaccgcacggcttaatggcccgttcggatcgcctgagtccaggatcatgaccttcatagtggaaggaacctgcgtggtatcacgcagatgccagccacacccggcggtgattaacaccgccagagataacaacaatgttgccagatatcgcacgcttcctcccgcgcttagccaacgaccagattgaggagtttacctggtacgtaaatcactttacgtacagtaacgccatcaagatattttgctaccagatgttcctggccagcacgttcgcgaacctgttcttccgttgcgtccaccggaacggtgattttggcacggactttaccgttaacctgcaccacgaccagcgtggagtcttccaccatcgctttttcgtcagcaaccggccacggcgcgttgtcgatatcgccttcgcctttcagttcctgccacagcgtgaagcagatgtgcggggtgaacgggttaagcatacggacaacggccagcagtgcttcctgcatcagagcgcgatcctgctcgccatcggttggtgctttcgccagtttgttcatcagctccataatcgccgcaattgcggtgttgaaggtctgacgacggccgatatcatcggtcactttagcgatcgttttatgcacatcgcgacgcagcgctttctgattttcagtcagcgcatcaacgttcagtgccgcaacatcaccttttgctgtgtgctcgtaaaccagtttccagacacgtttcaggaagcggttagccccttccacaccggattcctgccattcgagagtcatatcagccggagaagcaaacatcataaacagacgaacggtgtccgcgccgtaacgttcaaccatcacctgcgggtcgataccgttgttcttcgacttggacattttgctcatgccggtataaaccagttcatggcctgccgcatctttcgctttcacgatacggcctttctcgtcacgttcaacgatagcatcaaccggggaaacccagttacgttcgccgttttcgccaacatagtagaaggcatctgccagcaccataccctgacacagcaactgtttcgctggttcgtcagagttcaccatgcctgcatcacgcatcagtttgtggaagaagcggaagtagagcaggtgcataatggcgtgttcaataccaccaatgtagatatccaccggcagccagtagttagccgcttcggaatccagcataccttctttgtactgcgggcaagtgtagcgcgcatagtaccaggaggactccataaaggtgtcgaaagtgtcggtttcacgcagtgctggcataccgttaacggtagttttcgcccactccggatctgctttaatcgggctggtaatgccgtccattaccacatcttccggcaggatcaccggcagctggtcgtccggggtcggcattacggtaccgtcttccagcgtcaccatcggaatcggcgcgccccagtaacgctgacgggaaacaccccagtcgcgcaggcggtagttcactttacgctcgccaacgcccatcgcagtcagtttatcggcgatggcgttgaaggccgcttcatggtcaagaccgttgaactcgccagagttgaacagcacgcctttttcagtcagggcttgctgagaaagatctggctcagagccgtcagctgccaggataaccggtttgatgttcaggccgtatttagaggcaaactcgtagtcgcgctggtcgtgccccggtaccgccataactgcgcccgtgccgtactccatcaatacgaagtttgctgcccaaacgggaatttcttcgcccgttaatgggtgaaccgctttaaagccagtatcgacgccttttttctccatcgtcgccatttcagcttcggcaactttggtgttacggcattcgtcaataaaggccgccagttcaggattattttccgccgctttctgcgccagcggatgacccgcagctaccgccaggtaggtacaacccataaaggtgtccgggcgggtagtgtaaacggtcagcgtgttgtcatagtcgttaacgttgaaggtgatctccacgccttcggaacgaccgatccagttacgctgcatggttttaacggtgtctggccagtgatccagtttatccagatcgttgagcagctcgtcagcgtaagcagtgattttgataaaccactgcgggatctctttacgttcaactttggtatcgcagcgccagcagcagccgtcgataacttgttcgttcgccagtacggtctggtcgttcgggcaccagttgaccgcagaagtcttcttatataccaggccttttttatacagctcggtgaagaatttctgttcccaacggtagtattccggcgtacaggttgccagctcgcggctccagtcataaccaaagcccagcattttgagctggtttttcatatacgcgatgttgtcgtacgtccacggtgccggagcggtgttgtttttcaccgccgcgccttccgcaggcagaccaaacgcgtcccagccgatcggctgcaggacgtttttgcccagcatacgctggtagcgggcgatcacgtcaccgatggtgtagttacgtacgtggcccatgtgtagtcgaccagaaggatagggaagcatagacaggcagtaatacttctctttgctctcgtcttcggttacttcaaatgtgcgcttctcatcccaatgaagctgtactttggattctatctcttccgggcggtattgctcttgcatggcagccagtggtcctgttttcaatacggctacaaatgtagcgttgaggtggtttttcagatccgcatagcatagcccaaacgtccgcgtcaaaacagcctttcgcgcactcgacgttgaaatgatgcccggattattcatacattaatttacagagtttgtgggcgtattagcaaagcaaggaacaaagaacgtctattattatagtcagttaacgacccgggagatgaaacgatgaacaaggttgctcaatattaccgtgaactggttgcgtcactgagcgaacgcctgcgcaatggcgaacgtgatatcgacgcactggtggaacaggcgcgcgagcgcgtaataaaaacaggggagttaacgcgaaccgaggtcgatgagctgacgcgagctgtcagacgtgacctggaagagttcgccatgagctatgaagagagcctgaaagaagaatctgacagcgtctttatgcgggtgattaaagaaagcttgtggcaggagctggcagacatcaccgataaaacgcagcttgaatggcgcgaagttttccaggacctcaatcatcatggggtttatcacagcggagaagtggtcgggctgggaaatctggtctgcgagaaatgtcacttccatctcccgatctacacaccggaagtgctgacgctatgcccgaaatgtggtcatgaccagttccagagacgcccgtttgagccgtaatagtctgatttcgcacagcaataaagagaatatgggccgaatgaaattccccggcccttgtttttatctctacagtaaatcttcagtctcacgaatttcctgactgacatctctggttccggatgactgaactttacgatacaggtcgagagcctgtcggagatcgacaggtcttccttctccgtagtgatacataatggccaggttataccaggcagtggcgtcattgcattcagcggctttcgtaaaccattcaaaggcagcctgataatctttctcaacgccttgtccgtgtttatacatataaccgatgttgacgtaagcgccgacgctcccctgagcggcagccttcagataccagtacatcgcttgcttatagtcctggtccaccccttcgccagcgttataatcccatgcaatttgaaactgggcgtgccgattaccctgctgtgcgcttttcaaataccagaatgcggcgagtgtcttgttttgagcaacgccttttccgtcttcataaagatcggccagattgttttgcgcgtcactatggccttgtaatgcagcttgtttgtaccagaaaaatgccagcgcatagtcttttgcgactccgttgccatttctgtacatccacccaagattattttgcgcataagacattccgctctccgcggctatctgataccagacaaccgcttctttataattgggggcttctccacgatccagtgtccagccaagggcgttggaagcgaaagtatggccttgtagggcagcttttttcagccagaagatggcttgctcattatctttatgacggcttttatcctcggtatacttttgccctaaggaatactgtgcttcacaatgaccttgctcagcggccagcttcagccagtaaaaggctttttcgtcgtccggagaatcaattgcgctatcgcgattataataaaacccaacaatatattgagcctcgcaatcgcctttttcagcacgttcgataatctcatctattgataaattatcgcagcaacttgacgtgaaaatcattatcatttccttatggttgcagataaaacatattatatttttatgtgttccatttttgcgtaagccttattttatgcgtattatgtcgcgtcagaaaagtataaataaacgagcctcgcaatgcggctaatattcatttaatgaatatttaaggataaattatatggacatggagtcgcaaaaaatattgtttgcactttccactccgatggaaatacgcaatgaatgctgtttaccttcgcattcatcacccaaaatgtatttaggtacatgcttttttgacctttcttcctcatggggaattgatgaccgtgatgacctgctgcgcacaattcaccgaatgatcgataacggtcatgccgctcggttggcagggttttatcaccgctggtttcgttattcgccatgtgaatggcgtgactatcttgctgaactaaatgagcaaggtcaggcttatgcgcaatttgtcgccagcaccgccgaatgctgtggcgaagggggaatcaaagcctgggattatgtccggatgggttttttaagccgaatgggcgtacttaataactggttgagcgaagaagaaagtctatggatccagtcgcgcattcatctacgggctctacgttattatagtaactggcggcaatactttgccggttatacctttggtcggcaatattggcagtctcccgaagatgatcatctgcctttattacgcgaattcttagcgcgtaaagaatacgacgattccggcaatgatatgttttatcaattatttgccagtgatgatgcgtattaccctaccttgtcctggcaaccattggcttactattctgcatgcccggaaacgcttaaggatatgagcgacctatgaaaaattgctggaagatcctcgatatagaggaaacgactgacgtcgatattatccgccgcgcttatctggcgctgttaccgtcctttcatccagaaaccgatccgcagggttttaaacaacttcgtcaggcgtatgaggaggcgctacggattgcgcagtcgcctgctaaatctgtttggcaaccagaagaatatgaggtagcagaacatgaaattctgctcgcctttcgtgcgttacttgcctctgatagtgaacgttttctgccctccgcctggcagcgattcattcagcaattaaattattgctcgatggaggagattgatgaattacgctggtcgctgtgcacaatcgccatgaacactgcccatttatccttcgagtgcgtggtgttattagcagaaagattgcggtggttacaggaggaaaataccggggaaatagacgaagaagaactggaatcctttttatatgccattgcgaaggggaatgtttttaacttccagaccattctgcatctgcccgttgccgtgcaaaatgacaccatcgatttttaccaaatgttcgctcggatttggtcatcgcatccacaatggctgacattgtatttagcgcaacatcgcgcagtgattatccccgatgatgcaaaactgcacagaaatttactccgctggtatagcgcaggtcgcctggatatccccgaacttctggattacgcccagtcatggcgggaaactgaacctgataatgaagatgcgccttattatgaatacgcgcaacgcgtctattgtggagaaggcgaaagcctgttggcagaactttgtgactactggcgcgagtatccctccacccaggcggatgctttaatgttgcaatggtgccgtcagcatcgggtcgattattacccattactggtgatgatgattgaagcgcgtgatctggttaacgatcagggaaaaccgctactttatgtccccggcgacagcgcccgtacgcgttttcatttatacgaaatactcagcgatgaaaaactctctgcgctggggcgttcactggtcgagatggttttgcacaaaggacgtaagccgcggatctcactcacgcgtgatacagaacataccttatggccattatatctagttgccaaacaattagtgcaggcctgccaacctacagaagaatcattaatgccgattgtgagccgccttgatgcagaaaatcgttgtccactggaagcattaattattcgtcgattattaattcaggcggcgaattttaccgagaagcaaactgttgaaccggagccgcaaccgcagccaatgcccgttgacgatggtgggccaggctgtctgggcatcattaaaattattttctatatttttatctttgctggtttgatagggaaaatactccatctgttcgggtgacagtcgacgttaatgtgcgggaagcccggcaagtaatctttccgcatttttgtaatgttgtttggcggtcagttttaaccatttttgagattcataatggttaacattaatacctgagccatttctgtagatcaaacctaaagtatattgagcatgagcatacccttgttcagctgcttccttataccagagaattgctttacgggtgtcgggtttgacccccagacctttgaggtagatccaccccagtttactttgcgcgcgtggattttcctgttccgctgattgctcataccagtatctcgcctgtgtataatccagtggtttaccgtcgctaccatgaagataaaattctccaaggcgatattgcgacgttgagtgaccatgaatcgcggaaagctccgtggctgccgtggtgaatggaagactgcccggtgagcttaaataatcaaaggcataattcaccatggctttatcacgcaacgtcgttttcttgggttggctaatacaggtaattgctgcaactataaaaattgcgaatatatacattaattttttattcatgtgtgaatgcttcgattttctttttattttgaaagcgtcaagtttatactcatcaataataaaaaagtagtcagttaatgcacttaagggattattaacaaatgaataaggaagaacaatatcttctttttgcgctttctgcgcccatggaaatacttaatcagggttgcaaacccgcgcatgactcgccaaaaatgtatactgggataaaagaattcgagctctcatcatcctggggaataaataatcgtgatgatttaattcagactatttatcagatgactgatgatggtcatgccaatgatttagctggcttatatctgacatggcatcgctcttcccctgaagagtggaaagcattaattgctggtggctcggagagagggttgatttatacccaattcgttgcccaaaccgctatgtgctgtggggaagggggaatcaaagcctgggattatgttcgaatggggtttctgtcacgggtcggtgtgctcaacaagtggctgacggaagaagagagtttatggctgcaatcgcgcgtctatgtacgagctcaccattactatcacagctggatgcactatttttccgcctattcgttaggacgtctctactggcaatcttctcagtgcgaagacaacacttcgctacgcgaggcgctaaccctgtacaaatacgatagcgccgggagtcgtatgttcgaagagctggcagcgggaagcgatcgtttctatgccacgcttccctggcagccattaactgtccagtctgaatgcccggtaacgcttaaggatgtgagcgacctatgaaaacatgttggcaaatcctcgaaattgaaagcacgacgcaaatagacattatccgccaggcttatcttgctcgcttaccgttgtgtcatcccgaaaccgatccgcaagggtttaaagcattacgccaggcctatgaagaggccctgcgactggcggtaaatcctgtcgaggaagcagatgatgaagaaaaagatgctgccgctgaacatgaaatactacgtgcattcaggacattactggattcagaaagtgatcgttttcagccttccgcctggcagaaatttattcagcaattaaatacctggaacatggaggatgtcgatcaattacgctggccgctgtgtgcaatcgccatagaagcgcgatatctttcattaaattgtgcttctttgctggcagagcgtttgaactggcattcatttaatgacagcgaaggaatggatgaggaagaaagggaggcttttcttgaggccattcaggctggtgattgtttcgatttccttagccttctggaatatcccattgcgttgcagaaccagactgttgagtattacttcgcgctggaacgttgctgccgttaccatcctgactatgtcactgcgtttttggcgatggaaggtccgtggttaattcctgatgatgcaaagttacatcgcaaactgttgcgctggtacagctcggtgcaaacaggtatggcggaactcattcctgtcgctcaacagtggcaaacggaagaaccagaaagcgaagatgcccggtattacttgtgtgcacaacgtttgtactgcggcgagggggaaagcctgcttgccgatctctgcgcgtactgggaaagttacccatctacacaagctgataatttgttgttgcagtggagcaagcgtcattgcccggattatttcgcgttattagtgatggttatcgaagcgcggagcatggtagatgcgcaaggtcaaccgctgaaatatgttcctggtgagagcgcccggacgcggctgttatgggcggagattttacatagcggaaaattatcgccgttaggtcaatcgtttattgagtcgttattcttcaagcgcaaagcatgggcgtggtggaaatcgagagtcggtagcgagacagagcaagattcaccgttcctggatttgtatcgggtagcggaacaggtagtacttgaagcgtttccgaaacaagagatgctggcccgtcttaatacaaggctggaaggcggagatgctcatccattagaggccattgtcacccggatgcttttgacgaaagtgaaactcgagccggaggatgaagatgtcgatgagccaacacctgaaaatcatgaagaaaaaaatgatgagggtgaaaaaccacagagcattaccagcattatcaaaatcagtttaacggtgctggtgataggttatgctctcggcaaaatcgcgatgttgtttagctgacgatgtgttttttgcgccgatgccggatgcagcgtttacgccgcatccggcagccgtgtttatgggatctcaatggctaaataatcgctcgcccgccgccgaacttcatccacgcgggccatatcgtttgactgcaacgccgcatcaaaatcggtgatcacccggccgatctcttctcgctcgtcacccagcgcccgcgcccacaactcttccagtttggctttaaaggtgcgattgatgagcatatcgcgcggataaattttcaatgcggataaccgcgtccgactctcttcaatctgctgcgcgctcaatgttaccgggctgtggttaatcactctggacttaacgctgccgtcttccagaagcacgtcaacttcaagcaacccgttgatatcataactaaagcgaatatcaatcgactgataagccccggttttcttcaacggcacatcgaaggattccaccagaatgttgtttttaactttgtggttttctccctgatagacgttaaccgtaattgaatcctgttccgggtgcatggttgaataagtttctacacgcgacacgggcacagtggtgtttcgttcaataatcggcgagaaaatgccggaaacgccctggcggttaacttcaacgcccaacgagtaagggcaaatatcagtgaggattacctcttcaatatcttcactgcgtaagcggcaggcggcctggattgctgcgcccagcgcgacaatggtgctcggatcgtaactttgatacggtaatttgccaaacagacgcacggcgattcgctgcaccagcggcatttgtgacgcgccgccaaccagcaccagactgtcgatttgactcggcttcagacgcgcatcgcgcaacgcctgttcaatcggcactcgcaagcgattgagcagcggcaaccacaaatcttccagttcgttctcgtaaaattcgcattcccgcgtttcttcctgatactgccagcgaatgtgcaatggcgattgattgctacattttgccgcttccacacaggcgtacaaggctgccagttcactctcgttaagcgtggtcctggcgacatccgcgcgttttaaaacctcatcgaccagcatatgggtaaaatcttcgccaccaagaaagttgtcgccagcggaggcgtgaacttcaatcaccggcgtggcgtactcaagcaccgtaacgtcaaacgtgccgccaccgagatcaaacaccagcgaacgggtattttgttgggtatgcaggccatacgccatcgcagctgctgtgggttcattaattaagcgtaccgcatttaacccggctaactccgctgctaaacgggtatgcttgcgttgttcatcgctgaaataagccggaacggagatcaccacatctttaatcggacgttgcagaaattcttcggcatcttcttttaatgagcgtaataccaaagaggacagttctggcgcgttaaatgtgtcgctgcctaaccgccagttggtattactgcccattgcacgtttaaataacgctgccgttttatccggatgcgaagtacgccgtgatacagccggttttccgactaaaatatgattattttcatccatgctaattatggatggtgttaaatattcaccgaacttatttggaattaattgcgcggcaccgtctttccagacggcaattaaactattggtagtaccgagatcgataccaatggcgagttctgcattatccattgcatttatatcttgaaagaaaaagagataaacagattaagaccacccaggtaacgcgtggtgatcttaatcaatgacgtgtgttaagcgtaaaatttcagacgatcagccagtaaatcaacaaagccctgacgatcaacatcgaccattacggtggcattcggtttattgcctgtcagataataataatcaacaaccgtcataccctgggtatatttcccctgtgtttccacgccaacccagcgctcaacagaggtaaataactccggtttcaacagccaggcgatggtgcatgggtcatgcagtggtgcgccgacaaagccccatttttcgtctttatgatattcgaggaagaaatccagcagttcggcaacaatggttgaaacagggttaccaatcgcgcggaaacgctcggtgtcttcaacgtggatttgtgctttatgagtaacatccagaccggccatcaccaccgggatccctgactggaagacaatttctgccgcttccgggtcaacgtaaatattaaattcagccgcaggcgtccagttacccagccccatagcgccacccataatcacgatacgggcaattttgctatgcagttccggatggctattgagcagcaaggcaacgttagtttgcggtccggtagacacaatggtgacaggttccgcactttcacgcagcgttttcgccatcagctctaccgccgtacagttttgcggtgcgaatgtcggttccggtaatgccgggccgtcgagaccgctttcgccgtgcacattgtccgcgataatcaactcacgcattaacggttttaccgcgccgcctgctaccggaatatcggtgcgattaagcaaggtcagcatacgcagaacattgcgtaaggttttttctggtgtctggtttccggcggaagacgtaattgctttgacatcaagctctggtgaggcgagggcgagaactattgcgatagcgtcgtcatgacctgggtcgcaatctaacagaattggcagtgccattgttgctccttgttgtgtgcttctttgcgacaagggtaacgccaggatgtaacagatacgaggggcgaaacgataaagcgtgagatggcgcgcaattgggtatgcgcgccagagtgattaatgcaggattttcgcgaggaagtcttttgcgcggtccgatttcggatcatcgaagaaagcgtctttcggcgagtcttcgacaattttaccctcgtccataaagatcacccgattcgccactttacgggcaaagcccatttcgtgggtcaccaccatcatggtcattccttcgttcgccagttccaccatcacgtccagtacttcgttgatcatctccggatccagcgccgatgtcggttcgtcaaacagcatcgcaataggatccatacacaacgcgcgagcgattgccacacgctgctgctgaccgccggaaagctgcgccggaaacttattggcgtgagcagaaagcccgacacgctccagcagtttcagggctttttcacgagccggcgctttatcgcgtttaagcactttcacctgcgccagggtcaggttttcgataatcgacagatgagggaacagctcgaaatgctggaataccatcccgacgcgggaacgcagctttgccagatcggttttcttgtcgttaaccacgataccatcgacggtgatttcaccttgctgcaccggttcgaggccgttgacggttttaatcagcgttgatttgccggaaccagacgggccgcaaaccaccaccacttcgccttttttcacttcggttgagcagtcggtcagcacctgaaagtgaccataccattttgaaacatttttcagggtaatcattatgctgtccttcttttcaagtagctgaccaacaacgacgcgctaagactaataacgaaataaacaaatccggcaaacaggatcatctcaacctgcgtaccatcacgctcaccaatggttgaggcggtacggaagaaatcggccagggataacacatacaccagtgaggtatcctggaacagtacgatgccctgagtgagcagcagcggcaccatcgcgcggaacgcctgcggcagaataatcagtttcatcgactgccagtgagtcattcccaacgccagcgcggcgctcgattgaccacgagaaatactttgaataccagcacggataatctctgaatagtaggccgcttcaaacatcgaaaacgccaccatcgccgaaattaaacggatatcattttttggcgataatcccagcacgttttgcagaaaacccggcacgatcaggtaaaaccacagcaaaaccataactaaaggaatcgagcggaatacgttaacgtaggctttggcaaaccacgccacgggcgcaaagctggataaacgcatcaccgccagcatcgtgccccacaaaataccaatcactaccgccgtgacggtgattttcagggtgatcaccagcccgtcgagcagatatggcagggaagggacaatggaactccagtcaaactcgtacattatttgccccccatgttgccaggcaggcgaactttacgttcaaccagcgtcatcaccagcatgataaaagcgttaatcaacacatacgccagcgtaatggcggtaaacgactcccaggcatgggctgagtaatcgagcaatttacccgcctgcgccgccatatccaccagaccgatagtcgaggcgatggcggagtttttcaccaggttcatcatctctgaggtcatcggcgggacgataacgcgataagcattaggcagcagtacgtatcgataagcctgcggtagcgtcaggcccatcgccagcgcggcatttttttgccctcgcggcagcgactgaatcgcggcgcgtacctgttcgcaaacacgggcggcggtaaacagccccaggcagagcatggatgaaaggaaaaactgaatattgggatccagctcggccttaaaccacatgccgattttctccggcagcagctccgggatcaccagataccaggtaaagaattgcacaatcaacggcacgttgcggaacagttcgacatacaacgtacccagaccagagagaaaacggtttggaacggtacgtaaaatgccgaaaaatgaaccgacgaggaaagcgataatccaggcgcagatcgacaaagcgatcgtcacctgaaaaccactccagatccaaccaagataggtggtgttgccgaacggggcttgttgtaaaaaaataccccagttccagtctatagacataaatctactccagaaaaaagagggtagcagcgttaactgctaccctcgaagattgttacccagcgtattgcggttttcaggcccgatggggaacgaccatcaggcgtatagtctgtccgtgctacgtaacaatcgagagggctggaatttccgcccctggttcttgtaattagttcagtgccttgtcattcggttctttgaacagtgctttcatttcgtctgacagttcgaaattcatgttcaggtttttcggcggaattggatttttgaaccacttatcaaaccatttttccgcttcaccggaggtctgcacctgagcgatggtgtcatccatcagctttttgaactgcggatcatctttacgcaacatacaaccgtaggcctcctgagactgcggcttgccgacgatttcccagttgtctggtttcttcgctttcgcacgttcaccggccagcagagcgtcatccatcataaaggcaacggcacgaccgctttccagggtgcggaaagagtcaccgtgatctttggcgctgatgatgcgcatattcattttttgctcttcattcagtttgttgagcaaaacttcagaggtagtgccggaagtgacgactacggctttgtctttcaggttggcaaaatctttgatatcgccaccctttttggtcaacaggcgcgtaccgaccacgaaaatagtgtcagagaaagccgcctgtttttggcgttcgacgttgttggtggtagaaccacattcaaaatcgaaagtgccgttttgcagcagtggaatacggttttgtgaggtaatcggaatcagttttacctgcaagtccggtttgttgagtttctttttcactgcttcaacaatggcgttggagtaatcctgcgagtaacccaccactttttgctgattgtcgtaataagagaaaggcactgaagattcacggtgaccgacgacaatcacaccgtttttggcgattttgtccagagtactgcccgctgccggggcggcgtcatctgcctgtgccagtcctgcggaaagcgccagggcgaggattgctgtggcaggtttacgtaattgcatatccaactcctttatcttctgcgttaagaacgcatggatacccgttgtgagtgtttgtgttgttatcgtctgcaactttattgtgcagtgttgtgcctgttagggaaggtgcgaataagcggggaaattcttctcggctgactcagtcatttcatttcttcatgtttgagccgattttttctcccgtaaatgccttgaatcagcctatttagaccgtttcttcgccatttaaggcgttatccccagtttttagtgagatctctcccactgacgtatcatttggtccgcccgaaacaggttggccagcgtgaataacatcgccagttggttatcgtttttcagcaaccccttgtatctggctttcacgaagccgaactgtcgcttgatgatgcgaaatgggtgctccaccctggcccggatgctggctttcatgtattcgatgttgatggccgttttgttcttgcgtggatgctgtttcaaggttcttaccttgccggggcgctcggcgatcagccagtccacatccacctcggccagctcctcgcgctgtggcgccccttggtagccggcatcggctgagacaaattgctcctctccatgcagcagattacccagctgattgaggtcatgctcgttggccgcggtggtgaccaggctgtgggtcaggccactcttggcatcgacaccaatgtgggccttcatgccaaagtgccactgattgcctttcttggtctgatgcatctccggatcgcgttgctgctctttgttcttggtcgagctgggtgcctcaatgatggtggcatcgaccaaggtgccttgagtcatcatgacgcctgcttcggccagccagcgattgatggtcttgaacaattggcgggccagttgatgctgctccagcaggtggcggaaattcatgatggtggtgcggtccggcaaggcgctatccagggataaccgggcaaacagacgcatggaggcgatttcgtacagagcatcttccatcgcgccatcgctcaggttgtaccaatgctgcatgcagtgaatgcgtagcatggtttccagcggataaggtcgccggccattaccagccttggggtaaaacggctcgatgacttccaccatgttttgccatggcagaatctgctccatgcgggacaagaaaatctcttttctggtctgacggcgcttactgctgaattcactgtcggcgaaggtaagttgatgactcatgatgaaccctgttctatggctccagatgacaaacatgatctcatatcagggacttgttcgcaccttccttaggtaacatttagtttggctaaatgtaaagatattgctgttttattgtttgtttttgcgagatgcgccgcaccattccgaagcaaaattcttaaaatgcactcttttagtgctaccgctggattactgtggtgcaactaggttgtactgatgctgtttcagggtttgccttgtataacaaagcaatagatgtgccaaagttggataggagaatattgttatccggataatgcactgatgccgcatccggtgagcgtgccgaaatatgggatgtattccggcacgataagaagggattatttacgtcgctgacgcagactcatcaacacagcagcaaaaccaaacaatgccgtcagcacccacagcggccagttgccggtacgtgcgtatggtgtgagtccggtggtcggcgtcacgttagtggttaacacctcgcgggtgaactgcgggatcatcgcctgaatctcaccctgcgggccaatcaccgccgtaatgccgttgttggtgctgcgcaacagtgggcgcgccagctccagcgcacgcattcgcgccatctggaagtgttgccatggaccaatagatttaccaaaccacgcatcgttggagatagtcagcagatagtcggtatccgggcggaagttatcgcgcacttgctcgccgagaatgatctcgtagcaaatagccgcagtaagctcaataccatttgccgacagcggcggctggatatatggcccacggctgaacgacgacatcggcagatcaaagaacggtgctaacggacgcagaatcgactccagcgggacaaactcgccaaacggcaccagatggtttttgttatagcgatcggctgattcgtagctgtacggcgcacctttacccagcgtgatgatggtgttgtaggtatcgtagcggttctgcttattgagacgcgcgtcgacaatcccggttaccagcgagctacctttatcacgcaactcaccgtccagtgctttgaggaacggttgctgattaatttccagatcggttatcgccgactccggccagataatcaacgatgatttgcccatcagcggtgccgttgcgttgtagtaaatcttcagcgtattaagaagctggccttcgtcccatttcagcgattgcggaatatcgccctgaaccatcgaaacctgaatggttttctccggttgtggggtaaaccactggatgtaacgcagcgggaagggaagggcaaacagcacgacggccaccaccagcggacgccagttgcgtttgaccaacgccagtgccagcaggccactaaccatcatcagcaggaagttaatggcttccacgcccattatcggtgccagcccttttaacgggccatcaatctggctatagccgaactgtaaccacgggaagccggtcagtacccaaccgcgcagaaactcggtcacttgccagagggcaggggcggcaatcgctacgcgcagccaggtggttttcggccacagacgcgacagcacgccagcaaacagtccggtatacagcgacaaatacgccgccagcagcaccaccaggaagatgttaaccgggccaggcattccgccaaaggtcgcgatgctgacatagacccagttaataccgctgccaaagaggccaaatccccagcaaaagccaatagcggcagactggagtggacggcggttaaaggtcaacgcctgaagccccatcagcgaaataatcgccgcaggccagacgtcgtaaggagagaaggccagcgttccgcaggcaccgaataataacgccagcagcaggcgaatgcgctggcgttcaattaatgaggcaaaagccatgtagttatctatccagtttcggttttattcatccagcttcggctggggtgagtcatccgggattttaacatgaacctgaataatacgccgactgtcggccatcgccactttgaactggtaaccgtcgatgtcgatagtttcgccacgcgccggaagatgcccaaatgcctgcatcaccagaccaccgatagtgtcgacttcttcatcgctaaagtgggtgccgaacgcttcgttgaagtcttcaatggaagccagtgcgcgtacggtccaggtatgacgactcagctgacggaagtcgatatcatcttcttcgtcatactcgtcttcaatctcaccaacaatcagttccaggatgtcttcaatggtcaccagaccggaaaccccaccgaattcgtcaataacgatcgccatgtggtaacgctgagagcgaaactctttcagcatccggtctacgcgcttactttcaggaacgacaaccgcctgacgtaacactttgtccatgctgaaggcttcagcatcgctgcgcataaacggcagcaagtctttcgccatcagaatcccttcaatgtgatctttgtcttcgctaatcaccgggaaacgtgagtgggcggactcgatgatgacatcaagacattcgtccagcgtctggttgcgtttcagggtaatcatctgggagcgggggatcatgatgtcgcgaacgcgttggtctgcgatgtccatcaccccttcgagcatatcgcgcgtatcttcgtcgataaggtcgttctgcccggaatcacggatcagcgccagcagttcgtcacggtttttcggttcaccgtggaaaagttggctgagtaacagggagaaaaatcccttcttgttgcttatcgtgtcactactgtgtgaattgtcgtcgctcatggcgtcgtatgggttctcatgttagttaatcaaaacgccgtcgttaatcaccaacggcggggacgtctgccagtcaaatgcctggcaaattattctttctcggcaatgtacggatcctcatagcccagagcaagcataatctctgtttcgagggcttccatttcttctgcttcgtcatcttcgatgtgatcgtaacctaacaaatgcagactgccgtgcaccaccatatgcgcccagtgcgcctccagtggtttgccttgctcctgagcttccttctcaaccacctgacggcagataaccagatcgcccagtagcgacatttccatgccaggcggcacttcaaacgggaaggagagcacgttggtcggcttatccttaccgcgataggtcagattcagactgtggctttcggcggtatcgaccacgcgaatcgtcacttccgattcttcctgaaactgcgggatcaccgcattcagccatgtctgaaactggctctcttccggtaacccggaattatcttcacatgccagttgtaaatcgaggatcacctgactcatttttgttcctgttcttcgcgcttgcgttctgctgccagcgccgcttttcgtttttgttcggcttcttcccaggcttcataggcgttaacgatacgcgccaccacagggtgacgaaccacgtcttcgctgtggaagaagttaaagctgatctcttcgacatcggccagcacttcgatggcgtgacgtaagcctgatttagtattacgcggcaggtcgatctgtgtgacgtcgccggtgataaccgcttttgagttaaaaccgatacgggtcaggaacatcttcatctgttcgatggtggtgttctggctctcatcgagaatgataaacgcgtcgttcagcgtacgaccacgcatataggccagcggtgcgacttcaataacgttgcgctcaatcagtttctcgactttctcaaagcccagcatttcaaacagcgcgtcgtacagcgggcgcagatacgggtctactttctggcttaaatcgccaggcaggaagcccagtttctcaccggcttctactgccggacgagtcagcagaatacggcgaatttcctgacgctccagggcatcaactgccgcagccactgccaggtaggttttacccgtacccgccgggccaacgccgaaggtaatgtcatggtcgagaatattggcgatgtactgcgcctggtttggcgtgcgcggcttaattacgccgcgtttggttttgatattgaccgctttgccgtactccggcacgctctccgcgctttgctccagtacccgcgcttctttaatcgcaaggtggatctgttccggttcgatatcctgaatctgaccgcgcatcggggcagtatcgacatacaggctacgcagaatgtctgccgcagcggtgacgcaaatcggacggccggtcagtttaaagtggttatcgcggcgattgatctcgatgccgagacggcgttcgagctgcttgatgttgtcatcaaacgggccgcacaggctcaacagacgcgcattgtctgctggctccagggtgatttcgcgagtgtctatgttcaaaccgttcctcttatctgtatgccgccggaagctgaacattcaccggcctataaggaaattattcacgccacaggaaaaaggcgcaagcattgcaataaagatggggataaagagagaaaaaacaaggcccaccggaacggcaggcctgagaattacggctgataataacccacgccaaggtcgttttctttgcgggtacgggcaatcactgattccggtgtttctgccacgcgcagacccatttcatcttcagtacgcaccactttaccgcgcagagagttcgggtagacgtcggtaatttctacatcgacgaatttaccgatcatatccggcgtgccttcgaagttgaccacgcggttattttccgtacgcccggaaagctccatgatgctcttacgcgatgtaccttctaccagaatacgctgggtggtgccgagcatccggcggctccacgccatcgcttgctgattaatgcgctcttgcagaatatacagacgctgcttcttctcttcttccggaacatcatcaaccatatcggcggctggtgtacccggacgtgcagagaagataaagctgtagctcatgtcgaaattgacgtcggcaatcagcttcatcgttttctcgaagtcttcggtggtttcgccagggaagccaacgatgaaatcagaactgatctgaatatctggacgcgccgcacgcagtttacggatgatcgctttgtactccagcgccgtatgggtacggcccatcaggttcagaatgcgatcggaaccgctctgtaccggcagatgcaggaagctcaccagctccggcgtgtcgcgatacacttcgatgatatcgtcggtgaattcgatcggatggctggtggtaaagcgaatacgatcgatcccgtcgatcgcagcaaccagacgcagcagatcggcaaacgatccggtggtgccgtcgtagttttcaccacgccaggcgttcacgttctgaccgagcaggttgacttcacgcacgccctgagccgcaagctgggcaatctcaaacagaatatcgtcggacggacggcttacctcttcaccacgggtgtaaggcaccacgcagtaggtgcaatatttattgcagccttccatgatggagacaaacgcggtcggcccttcggcgcgcggttccggtagacggtcaaacttctcgatttccgggaagctgatatctacaaccgggctgcggtcgccacgcacggagttgatcatctccggcagacggtgcagcgtttgcggcccaaaaataatatcgacatagtgggcgcgctggcgaatgtgctcgccttcttgcgatgccacgcagccaccgacgccgataatcaggtctggattcttctcttttaacagtttccagcgacccaactgatggaagactttttcctgagccttctcgcggattgagcaggtgttcagcagcagcacatccgcttcttccgccacgtcggtcagttgatagccgtgggtggcatccagcagatcggccatcttcgatgaatcgtactcgttcatctgacagccccaggttttaatatggagttttttggtcatcgacttgctcttgcgaaatagtagccaggaatgcagggcgcatagtgtaatgctttgctgccgttgtgaccagtatgagcgttatcagcccttaggggtaaaaatcctgtaaacttaaagcatattgctaacaggatgattgaccatgacaaatcaaccaacggaaattgccattgtcggcggaggaatggtcggcggcgcactggcgctggggctggcacagcacggatttgcggtaacggtgatcgagcacgcagaaccagcgccgtttgtcgctgatagccaaccggacgtgcggatctcggcgatcagcgcggcttcggtatcattgcttaaagggttaggggtctgggatgcagtacaggctatgcgttgccatccttaccgcagactggaaacgtgggagtgggaaacggcgcatgtggtgtttgacgccgctgaacttaagctaccgctgcttggctatatggtggaaaacactgtcctgcaacaggcgttgtggcaggcgctggaagcgcatccgaaagtaacgttacgtgtgccaggctcgctgattgcgctgcatcgccatgatgatcttcaggagctggagctgaaaggcggtgaagtgattcgcgcgaagctggtgattggtgccgacggcgcaaattcgcaggtgcggcagatggcgggaattggcgttcatgcatggcagtatgcgcagtcgtgcatgttgattagcgtccagtgcgagaacgatcccggcgacagcacctggcagcaatttactccggacggaccgcgtgcgtttctgccgttgtttgataactgggcatcgctggtgtggtatgactctccggcgcgtattcgccagttgcagaatatgaatatggcacagctccaggcggaaatcgcgaagcatttcccgtcgcgtctgggttacgttacaccgcttgccgctggtgcgtttccgctgacgcgtcgccatgcgttgcagtacgtgcagccagggcttgcgctggtgggcgatgccgcgcataccatccatccgctggcggggcagggagtgaatcttggttatcgtgatgtcgatgccctgattgatgttctggtcaacgcccgcagctacggcgaagcgtgggccagttatcctgtcctcaagcgttaccagatgcggcgcatggcggataacttcattatgcaaagcggtatggatctgttttatgccggattcagcaataatctgccaccactgcgttttatgcgtaatctcgggttaatggcggcggagcgtgctggcgtgttgaaacgtcaggcgctgaaatatgcgttagggttgtagccttacaacattgccggatgcgtgccaaccgtaggtcggataagacgcggcagcgtcgcatccgacattgaaggataagacgtgtcaacatcgcattcgacattgaatgaacgcagaaaagcaaaaagctcgccgaagcgagcttttttaatgtggctggggtacgaggattcgaacctcggaatgccggaatcagaatccggtgccttaccgcttggcgataccccaactgggtgcacttacaaggtaagcgtcttgaataaattggctggggtacgaggattcgaacctcggaatgccggaatcagaatccggtgccttaccgcttggcgataccccaacaaattggttttgaatttgccgaacatattcgatacattcagaatttggtggctacgacgggattcgaacctgtgaccccatcattatgagtgatgtgctctaaccaactgagctacgtagccagattgtttcttcgatggctggggtacctggattcgaaccagggaatgccggtatcaaaaaccggtgccttaccgcttggcgataccccaataaccgggcggtgaaccgcttactcgaagaagatggctggggtacctggattcgaaccagggaatgccggtatcaaaaaccggtgccttaccgcttggcgataccccatccgtacaacgctttctggtgaatggtgcgggaggcgagacttgaactcgcacaccttgcggcgccagaacctaaatctggtgcgtctaccaatttcgccactcccgcaaaaaaagatggtggctacgacgggattcgaacctgtgaccccatcattatgagtgatgtgctctaaccaactgagctacgtagccatcttttttttcgcgataccttatcggcgttgcggggcgcattatgcgtatagagccttgcagcgtcaacctctttttcaaggaaaattgctcgaaagtgactgtttggttaggttgcgaacagcgtggcgctatattcgtcaattattgtttactttgtgttttttcccaccctacagccattcttttgtcatacaggatgaaattcggaatttaacaatagtggtgggaaattaatctatgaaatactggcctacagtgatgagttgtcaaacagtgatgtggcaaacccggaacatttccttactgcatatcagaatcaacaagcacctcaataactgaaacagccccggatttcaccggggctgtttcgcatttcttacttatacgccgactggtgaacaccaaccgcgcgaccagacggatcgtccattttcttgaacgcttcatcccattcgatcgctttagcggaagaacaagcgacggaaggaccgcccggcacgcactcagcggcgctcggaagcgggaatagttcttcaaagatctcccgatacaagtacgcttctttagaggttggcgtgttgtacgggaagcggaagcgggcagtttccagttgctgatcagaaacctgctgcgcagccacttctttcagggtgtcgatccaactgtaaccgacgccatcggagaactgctctttctgccgccaggccacgcttgcaggcagatacgcttcaaaacattcacgcaggatgtgtttttccattttgccgttaccgcacattttatcctgtgggttaatacgcatcgccacatcaaggaattttttgtcgaggaacggaacgcgtgcttccacgccccaggctgacatcgctttgttggcacgcgcgcagtcatacatatgcagggccagcagtttacgcaccgtctcttcatgcagttctttggcattcggtgctttgtggaagtaaagataaccgccgaacacttcatcagaaccttcaccggacagcaccattttaatgcccatcgccttgatcttacgcgacattaaatacatcggtgttgaagcgcgaatagtggtcacatcataagtttcgatgtggtaaatcacgtcgcggatggcatccagaccttcctgtacagtgaagtgaatttcgtgatgcaccgtgcccagatggtttgccacttcctgggctgctttcagatccggtgaacccggcagacctacagcaaaggagtgtaactgcggccaccaggcttcagagcgttcctgatcttccacgcgacgggctgcgtatttcttggtgatagcggaaataattgaggaatccagaccaccagaaagcagcacaccgtaaggcacatcagacatcagatggcttttaactgaatcttccagtgcctgacgcagctcgtttttgtcggtcacgttatctttcaccgcatcgtagtcgaaccagtcgcgatgatagtaagaacggatttcgccgtcctggctccacaaatagctccccgccgggaactctttaatcgtgcggcaaactggcaccagcgctttcatttctgaggccacatacagctgaccgtgttcgtcataccccatatacagtgggatgatccccagatggtcgcgaccaatcaggtaggcatctttttcgctgtcgtacagtgcaaaggcaaacatgccctgcaagtcgtcgagaaattccggccctttttcctgatacagcgcgaggatcacttcacagtcagacccggtctggaactggtaacgatcgccatattcggcgcgcaatgcctggtggttgtagatttcaccgtttaccgccagtacgtgggttttttgttggttgtagagaggttgcgcccccgcgttaacgtcaacaattgacagacgttcgtgggcgagaatggcgttatcgctggcataaataccggaccagtccgggccacgatgacgcatcaggcgtgacagctcgagggctttcttacgcagctcaactgcgtctgttttgatatcgaatacgccaaaaattgaacacataaccttctccgttaacctggtatttgttgcttgttgtgtttgcttgtttaaaaaaatgccgcaaagcagcactgtgcgcaagcgatttggcggtgaaaaaataaaaaacgtaatggtgattgtcgattggtgaaaaaaggtctggtgtgaggatatatttattgatgaatcgataatttttagcgggttttattgaatgtttatattttacgggggccaaattgctgacaaagtgcgatttgttcatgccggatgcggcgtgaacgccttatccggcctacaaaagcatgaaaattcaatatattgcaggagctgcgtaggcctgataagcgtagcgcatcaggcagtttggcgtttgtcatcagagccaaccacgtccgcagacgtggttgctattcagataacgtcgatttcagcgactgacgggtaaatccagctggggcggaaaggcatactgtcgatatcgtcgagcgacgaaacaccagaaagcaccagaatcgtctccagacctgcctggaagccggccagaatatcggtacgcaggttatcgccgacaatcaccgtttcttccgaatgcgcctgcattttgtttaatgctgcgcggatgatccacgggctgggcttaccaacatagaacggtttgcgcccggagattttctcaatccctgcacacaacgcgccacaagcgggataaaaaccgcgcccgtgggtgtccggattggtggcgataaaacgtgcaccgttagcgacgaaataggctgctttatgcatcatgtcccagttgtaggaacgcgtttcgccaacaatcacgaaatcagggttcacatcggtaatagtgaaaccggctttgtacagttcataaatcagtgcgccttcgcccaccacatacgctttcttgccttcctggcgacgcaggaaatcggcagtcgccatcgcagaggtataaaacacgctgtcaggtacatcgacacctgcggtggcaaagcggttcgccagatcttgcccagtctgcgaaggatagttggtcagcaacaccagcggcaggcctttatccataatcccgtgcaaaaattccgctgcacccggtacggcgacgttatcgtgcatcagcacgccgtcgatatcgcaaattacatttttaatggtcatggactacccagaatattgacaacaataagcgccactataaaagcacattaattttccagcaaatgctggagcaaaataccgttgagcatggcgcgttttaccagcgcaaaagcgccgattgccgagcggtgatccagctcagaacgtaccaccggcagattagtgcgaaacgccttcagcgcctgggtattaatgcagctttcaatagcagggagcagcactttatcggcttcggtgatttcaccggcaataacaattttttgcggattaaataagttgatagcaatggcgatggttttacccagatgacgaccgacatactcaattacttccgacgccagactatcgcctttgttcgcggctttgcagatagttttgatggtgcagtcgtccagcggcacgcggctctggtagccctgctttaacagattcaacacccgttgttcaatggcagcgttggcagcgatagtttccaggcagccaaagttgccgcagtggcagcgttcacccagcggttcgacctgaatatggccaatttcaccgacgttgccgttgcggccaataaaaatgcgcccgttagagataatcccggccccggttccgcgatggacacgcaccagaatggagtcttcgcaatcctgacttgcaccgaagtagtgctccgccagcgccagactacggatatcgtgaccaacgaaacaggtcactttaaaacgttcttccagagcttctaccagcccccagttttctacctgaatatgcggcatgtaatgaattttgccgctgtccgggtcaacaagccctggcaggatcaccgaaatcgcgatcagctcgcgcagtttgcgctggtagctatcaataaactgagcaatggcattcaacagggcatgttccagcgtttgctgggtacgttccggcagcgggtaatgttcttctgccagcactttgctgctgagatcaaacagagtgatggtggcgtcatgacgaccaagccgtacgccgattgcgtggaaattgcgggtttcggtgacgatggagatagcgcggcggcccccggtggaggcctgctgatcaacttctttgatcagcccgcgttcgataagctgacgcgtaattttggttacgctggcgggggcaagctggctttgctcggcaatctgaatccgcgagattggcccgtactggtcaatcaggcgataaaccgccgcgctgttaagctgttttacgagatcaacattacctatctgagcttgtccgcctggtgtcatactttctcttattgagttacgacctcgttaccgttaacgatggtcttggtgattttaaaatcaggtgtgaatgcagtcaggttggctactttacctgcggcgagtgtgccgagacgtttctcaacgccaatcgcacgcgccggatagagcgtcgccatacgtagcacttcatccagtgcgataccgcaatgttcgaccagattacgcacgccttcaatcatggttaaggatgaaccgcttaacgtaccgttctcatccacacaaagtccgttacggtagtatattgttttacccgcaaaaatgaactgttcaatgttggcacctgctggcgcggtggcgtcagtaaccagacacagtttgtcgcctttcagacgtttagcgttgcgaatgttggcgtaatcaacatgcaggccatcagcaataataccgcaataaatgtcagcttcgtcgaggatcgcgcccgccaggccaggttcacgaccggtaatatacggcatcgcgttgtacagatgggtggcaaaggtaatccccgcgcggaaaccggcttttgcttctttcaacgtcgcgttggagtgaccggcagaaaccacaatcccggcatttgccagtttgctgatgacttccgcaggaaccatttccggtgccagggtcactttggtaatgacgtcggcgttttcacacaggaaatcgaccagcgcggcatcaggcttacgcacaaaattcggattatgggtgcctttttttaccagattcagccacggaccttccagatgcagacctaacgcctgattcggatgttttgccaggtactcgcgcataacgcgcacgccctgtttcatcagctcatcgctggtggtgataagcgtcggcagatagttagtacagcctgatttctcattggctttctgcatgatttccagcgtttccacgctgaccgcttcagcggtgtcgttaaactgtacgccgccgcagccgtttaactgcacatcgataaaaccgggggagagaatggccccgttcagtgaacgttgttcgatctctggcggcagttccgctaccggacagacgcttttaatcaggccatcagcgataacaaccgcgtggtcatcaagaaattcgtggccggtaaagatccggccctgggttaatgcatacattctgacccccgattttaaaaaatattgccctgagcaaggagccagggcagggataacaattacagacctttgatattttctgcttctaattcattgaaatatcttaaagtcttaactttcagctccatggtggaaggttcatcgcacaccatgatcgctttcggatgcagttgcagacagctgatggtccacatatggttcacgcaaccttcaacggcggcctgcagcgccagtgctttctggctacccagcaccagaatcatcacttcttcggcatccagcagtgtaccaacaccgacagtcagggcatattttggcacctgattaacatcgttatcaaagaaacgagagtttgcgacgcgagtgtcatgagtcagggttttgatacgagtacgagaagccagagaagacgccggttcgttaaatgcaatatgaccgtcgttacctacaccgcccataaacagatgaatttttccgtaagaacggattttttcttcatactggcggcactcggcgtcgatatccggggcgttgccgttgagaaggttgatgttttctgctggaatatcaacgtgatcgaagaaattacggtgcataaagctgtagtagctttccggatgctctttcggcagaccgacatattcgtccatgttgaaggtgacaacgtgcttaaagctgacctggcctgctttatgcatttcgactaacgctttataggtggtcatcggcgtgccgccagtcggcaggcccagtacaaacggacgatcggcagtcggtttgaacgcattgatacgattgacgatatggcgagcagcccatttgccgacctgttcagcggtagtcagggggatcagtctcattattcacctcaataagtaaaatgtaagccgttggcggattaggcatctttaagcgtaacctggatttgcgcagacaggcgtcaatccgacctgattttttgaatgataaaataagttttctggtttagccagtaaaagggagtgataataacgatatttggtgacaaaactcacaaaagacacgcgtttaatttgcgatacgaattaaattttcacacactctgtagcagatgatctaacaatctgattacagaacatcggcagtacaatttgcagcaaaataaaaatacggcttgaaacgagccaaatagggttctcgtagggggaataagatgaatattttaggttttttccagcgactcggtagggcgttacagctccctatcgcggtgctgccggtggcggcactgttgctgcgattcggtcagccagatttacttaacgttgcgtttattgcccaggcgggcggtgcgatttttgataacctcgcattaatcttcgccatcggtgtggcatccagctggtcgaaagacagcgctggtgcggcggcgctggcgggtgcggtaggttactttgtgttaaccaaagcgatggtgaccatcaacccagaaattaacatgggtgtactggcgggtatcattaccggtctggttggtggcgcagcctataaccgttggtccgatattaaactgccggacttcctgagcttcttcggcggcaaacgctttgtgccgattgccaccggattcttctgcctggtgctggcggccatttttggttacgtctggccgccggtacagcacgctatccatgcaggcggcgagtggatcgtttctgcgggcgcgctgggttccggtatctttggtttcatcaaccgtctgctgatcccaaccggtctgcatcaggtactgaacaccatcgcctggttccagattggtgaattcaccaacgcggcgggtacggttttccacggtgacattaaccgcttctatgccggtgacggcaccgcggggatgttcatgtccggcttcttcccgatcatgatgttcggtctgccgggtgcggcgctggcgatgtacttcgcagcaccgaaagagcgtcgtccgatggttggcggtatgctgctttctgttgctgttactgcgttcctgaccggtgtgactgagccgctggaattcctgttcatgttccttgctccgctgctgtacctcctgcacgcactgctgaccggtatcagcctgtttgtggcaacgctgctgggtatccacgcgggcttctctttctctgcgggggctatcgactacgcgttgatgtataacctgccggccgccagccagaacgtctggatgctgctggtgatgggcgttatcttcttcgctatctacttcgtggtgttcagtttggttatccgcatgttcaacctgaaaacgccgggtcgtgaagataaagaagacgagatcgttactgaagaagccaacagcaacactgaagaaggtctgactcaactggcaaccaactatattgctgcggttggcggcactgacaacctgaaagcgattgacgcctgtatcacccgtctgcgccttacagtggctgactctgcccgcgttaacgatacgatgtgtaaacgtctgggtgcttctggggtagtgaaactgaacaaacagactattcaggtgattgttggcgcgaaagcagaatccatcggcgatgcgatgaagaaagtcgttgcccgtggtccggtagccgctgcgtcagctgaagcaactccggcaactgccgcgcctgtagcaaaaccgcaggctgtaccaaacgcggtatctatcgcggagctggtatcgccgattaccggtgatgtcgtggcactggatcaggttcctgacgaagcattcgccagcaaagcggtgggtgacggtgtggcggtgaaaccgacagataaaatcgtcgtatcaccagccgcagggacaatcgtgaaaatcttcaacaccaaccacgcgttctgcctggaaaccgaaaaaggcgcggagatcgtcgtccatatgggtatcgacaccgtagcgctggaaggtaaaggctttaaacgtctggtggaagagggtgcgcaggtaagcgcagggcaaccgattctggaaatggatctggattacctgaacgctaacgcccgctcgatgattagcccggtggtttgcagcaatatcgacgatttcagtggcttgatcattaaagctcagggccatattgtggcgggtcaaacaccgctgtatgaaatcaaaaagtaatctgctttatgcctgatgcgacgcttgagcgtcgcatccaacaatgacaagcggtggagatcttctctgccgctttttttttcatcaatcatccccataatccttgttagattatcaattttaaaaaactaacagttgtcagcctgtcccgcttataagatcatacgccgttatacgttgtttacgctttgaggaatccacgatgagtgaggcagaagcccgcccgactaactttatccgtcagatcatcgatgaagatctggccagtggtaagcacaccacagtacacacccgtttcccgccggagccgaatggctatctgcatattggccatgcgaaatctatctgcctgaacttcgggatcgcccaggactataaaggccagtgcaacctgcgtttcgacgacactaacccggtaaaagaagatatcgagtatgttgagtcgatcaaaaacgacgtagagtggttaggttttcactggtctggtaacgtccgttactcctccgattattttgatcagctccacgcctatgcgatcgaactgatcaataaaggcctggcgtacgttgatgaactgacgccggaacagatccgcgaataccgcggcaccctgacgcaaccgggtaaaaacagcccgtaccgcgaccgcagcgttgaagagaacctggcgctgttcgaaaaaatgcgtgccggtggttttgaagaaggtaaagcctgcctgcgtgcgaaaatcgacatggcttcaccgtttatcgtgatgcgcgatccggtgctgtaccgtattaaatttgctgaacaccaccagactggcaacaagtggtgcatctacccgatgtacgacttcacccactgcatcagcgatgccctggaaggtattacgcactctctgtgtacgcttgagttccaggacaaccgtcgtctgtacgactgggtactggacaacatcacgattcctgttcacccgcgccagtatgagttctcgcgcctgaatctggaatacaccgtgatgtccaagcgtaagttgaacctgctggtgaccgacaagcacgttgaaggctgggatgacccgcgtatgccgaccatttccggtctgcgtcgtcgtggttacactgcggcttctattcgtgagttctgcaaacgcatcggcgtgaccaagcaggacaacaccattgagatggcgtcgctggaatcctgcatccgtgaagatctcaacgaaaatgcgccgcgcgcaatggcggttatcgatccggtgaaactggttatcgaaaactatcagggcgaaggcgaaatggttaccatgccgaaccatccgaacaaaccggaaatgggcagccgtcaggtgccgtttagcggtgagatttggattgatcgcgccgatttccgcgaagaagctaacaagcagtacaaacgtctggtgctgggtaaagaagtgcgtctgcgtaatgcttatgtgattaaggcagaacgcgtcgagaaagatgccgaaggtaatatcaccaccatcttctgtacttatgacgccgataccttaagcaaagatccggcagatggtcgtaaagtcaaaggtgttattcactgggtgagcgcggcacatgcgctgccggttgaaatccgtttgtatgaccgtctgttcagcgtgcctaacccaggtgctgcggatgatttcctgtcggtgattaacccggaatcgctggtgatcaaacagggctttgctgaaccgtcgctgaaagatgcggttgcgggtaaagcattccagtttgagcgtgaaggttacttctgcctcgatagccgccattctacggcggaaaaaccggtatttaaccgcaccgttgggctgcgtgatacctgggcgaaagtaggcgagtaattttaagtttcgctatgccggatggggcgtttacgtcgcatccggcaaggaacagacaaacagtttcaaacgctaaattgcctgatgcgctacgcttatcaggcctacatgatctctgcaatatattgagtttgcgtgcttttgtaggccggataaggcgttcacgccgcatccggcaagaaacagcaaacaatccaaaacgccgcgttcagcggcgttttttctgcttttcttcgcgaattaattccgcttcgcaatttatccataaaataaatttaaaataacaaaacataattaaataaaatgtaaccgctttcatcttgctggaatttcacgcttttattcttctgcaagcctttcaaccgcaaacttaagccttgtaacaaaaatcatcaaaatatgtgcggttgctcatgttcttacattctggttacagaaagagattgataattcgcgtcgcgaaaaatagtctgttcctgtagtcagcgagacttttctcaacgctacttttttaatttttattttttcgctgttcacctttggtgcagcaatttatacgtcaaagaggattaacccatgcgtacgtttagtggcaaacgtagtacgctggcgctggctatcgccggtgttacagcaatgtcgggctttatggcaatgccggaggctcgcgccgaaggattcatcgacgattcaaccttaaccggcggtatctattactggcagcgtgaacgcgaccgtaaagatgttaccgacggcgacaaatacaaaaccaacctttctcactccacctggaatgccaacctcgattttcagtccggttatgctgctgatatgttcggccttgatattgctgcgtttacggcgattgaaatggcggaaaacggcgacagctcccacccgaacgaaatcgcgttttcaaaaagtaataaagcctatgacgaagactggtccggcgacaaaagcggtataagcctgtataaagctgcggccaaatttaaatacggtccggtttgggcgagggcaggttacattcagccaactggtcaaacgctgttagcgccgcactggagctttatgccaggtacttatcagggggcggaagccggggcgaattttgattacggcgatgctggtgcgttgagtttctcctacatgtggaccaacgaatacaaagcgccgtggcatctggaaatggatgagttttatcagaacgataaaaccaccaaagttgattatctgcactcctttggggcgaaatacgacttcaaaaataacttcgtactggaagcggcatttggtcaggcggaagggtatatcgatcaatattttgccaaagccagctacaaatttgatatcgccggtagcccgttaaccaccagctaccagttctacggtacccgagataaagttgacgatcgcagcgtcaacgacctttatgacggcaccgcctggctgcaagcgttgacctttggttaccgggcggctgacgtagtggatttgcgcctcgaaggcacctgggttaaggctgacggtcagcagggatacttcctgcaacgtatgactccaacctacgcttcctcaaacggtcgcctggatatctggtgggataaccgttctgacttcaacgccaacggcgaaaaagcggtcttcttcggtgcgatgtatgacctgaaaaactggaatcttccaggcttcgccatcggcgcttcctacgtttacgcatgggatgctaaacctgcgacctggcagagcaatccggatgcgtactacgacaaaaaccggactattgaagagtctgcctacagcctggatgcggtctataccattcaggacggtcgcgccaaaggcacgatgttcaaactgcatttcaccgaatacgacaaccactccgacatcccaagctggggcggtggttacggcaacatcttccaggatgagcgtgacgtgaaatttatggtaatcgcaccattcaccatcttctgatgcccgacgcggcaggttttgtgcctgccgcacgtttgaggaatttgctatgaaaaaactgattctcatcgccataatggcatcggggctggtagcttgtgcgcaatcaaccgcgccacaggaagacagtcgtctgaaagaggcatacagcgcctgtatcaacaccgcacaaggttcgccagaaaaaattgaagcctgccagagcgtgttaaacgtgctgaagaaagagaaacaacatcagcagtttgccgaccaggaaagtgtacgcgtactggattatcagcagtgtctgcgtgcaacgcaaaccggaaatgatcaggcggtgaaagccgattgtgataaagtctggcaggaaatacgcagtaataacaaataagtgagagctgtaactctcgcttttcttatttcccttgcataaaaaagccaacccgcaggttggcttttctcgttcaggctggcttatttgccttcgtgcgcatgttcatcttcgcggcaatcgccttcggcacagtgaccgtaaagatagagactgtggttagtcaggcgaatgccatgttttgcggcaatttcacgctgacgcgcttcgatggaatcatcactaaattcgataaccttgccgcagtcgaggcagatcaggtgatcgtggtgatgttgctgtgtcagttcaaatacggatttaccgccttcaaaattgtggcgggtgacgataccagcgtcgtcaaactggttcagtacgcgatataccgtagccagaccaatttcttcacccatatcgatcagacgtttgtataaatcttccgcactgacgtgatggttgtccggctcctgaagaacttccaggatttttaaacgaggaagcgttactttcaggccagctttctttagggcggtattgttatcagtcatgcggaatctgtcctgttactaagcggttcacttcattagaagaagtgacagaatttgctcttgagataatgcgtatcattatagaattgccacgcctaaatgaaaaccacaagtccctggcaaatattgttaataaaaacgtggcacagcttacatttacaacggcaaggccacttgaacaccgggacattgtacaggtacaacagcaaaagttacaaatttgtagcaattattttgattggcattatctattaatacggcgtagacatgagtctacgccgcatcacatcaggcattgagaatttcgtcgagatgcaactcttcagaaatctgtttaacccatttttctacacgttcagcggtcagttccggctgacggtcttcgtcgatagccagaccgacaaagtggtcgtcatctgccagaccttttgatgcttcgaaatgatagcccgcagttggccagtgaccaacgatggttgcaccgcgcggttcaatgatgtcgcggatggtgcccaatgcgtcgcagaaatattcggcgtaatcttcctggtcaccacaaccaaacagcgcaaccagtttgccgttgaaatcaatctcttcgagagtcgggaagaagtcatcccagtcacactgcgcttcgccgtaataccaggttgggatgcccagcagcagaatgtcataagcttccagatcttctttgctgctttttgcaatgtcatggacatcggcaacgtctttaccaagctgtttttgaatcatttttgcgatattttcggtattaccggtgtcgctgccgaaaaagatgccagtgatagccatgagtgaaataacctcttgaaacttattgaaatgggggtggaaaattgcccacggataaaggcaatcatagcagaacaggcagtcttgcggaatcagcaaacgagcaggactgcacactgtgctacatgaaagtggaaatttaaacgatgccctgactacgcagcgccgccagttgctgcattaacatctcttcgatcagttcgctacggctcatattgcgcgactccgccagctcgttcagcgcctcgacagcttccgcgttcagcttcagttcgacacgcttaaggccacgtactttgtcgcgttttagctggttgcgtttattaatacgcagctgttcatcgcgcgaaagcggattagttttcggtcgtcccggtcgacgctcgtgcgcgaacagatctaatgtcgtacggtccgtttgttctttggccatgatcttggtgacttcgggggaaacaatcagccaggcctctgcccggatggatagcgcgccataatacatcagcgcgatgagtcacgccaacgcccacgcgcggaaagcgacgcggacgctgggtttttaatcagttgcgttaatcattgagatagcgacggatagcgcgtaataccgcatccggtttttcagcatggacccagtgacccgcgcctgcaatcacatgcgcccgtgcctgtggaaattgagccagtaaatcatcacggtactgctcgctaacatacggagaattgccgccagggataaacagggcagggtgatcccatgccgggattttctcccaacctacaatatgcggatactgatcccacaataccggcacgttaaagcgccactccccgtcaacaaaagatttcagcagaaactgaatcaccccttcttcattaagatgctggcgcattattgctgctgcttgctggcgagtttgtgcgtccgattcactgaccgcgttgatagccgcaaaaatctcatcatgacggcgtacgtgatagtcgaccggcgcgatatcgatcgccaccagtttatcgatgcgatcggaggctagtgcagtaagtgccattaccgctttaccgcccatggagtgaccgataaatgttgctttgtcgatctgctgtgcatccagagtatcaacaagatcctgcgccatcgccgggtaattcattaccggatctctcggtgaaagaccgtggttacgcatatcaacctggatgatattgtgatcgtttaccagatcgcgagccagtacgccaaggttgtcgaggctgccaaacagaccgtggacaagaacgatgggagaattattgtgctggttttgtgcagtttgcgcgcggatattcaatttcatggcaaagttctttttttcgcgttgtcgggttagggtattatgttgaccattgtgccacagggctgcaacaaataaggtttattccgagtttttctgcaagccaggcttgacgctatccgctgccgggatttattcatatactcctggcgacttgtattcagctaagacactgcactggattaagatgaaaacgattgaagttgatgatgaactctacagctatattgccagccacactaagcatatcggcgagagcgcatccgacattttacggcgtatgttgaaattttccgccgcatcacagcctgctgctccggtgacgaaagaggttcgcgttgcgtcacctgctatcgtcgaagcgaagccggtcaaaacgattaaagacaaggttcgcgcaatgcgtgaacttctgctttcggatgaatacgcagagcaaaagcgagcggtcaatcgctttatgctgctgttgtctacactatattctcttgacgcccaggcgtttgccgaagcaacggaatcgttgcacggtcgtacacgcgtttactttgcggcagatgaacaaacgctgctgaaaaatggtaatcagaccaagccgaaacatgtgccaggcacgccgtattgggtgatcaccaacaccaacaccggccgtaaatgcagcatgatcgaacacatcatgcagtcgatgcaattcccggcggaattgattgagaaggtttgcggaactatctaaaacgttgcagacaaaggacaaagcaatggcaatccacaatcgtgcaggccaacctgcacaacagagtgatttgattaacgtcgcccaactgacggcgcaatattatgtactgaaaccagaagcagggaatgcggagcacgcggtgaaattcggtacttccggtcaccgtggcagtgcagcgcgccacagctttaacgagccgcacattctggcgatcgctcaggcaattgctgaagaacgtgcgaaaaacggcatcactggcccttgctatgtgggtaaagatactcacgccctgtccgaacctgcattcatttccgttctggaagtgctggcagcgaacggcgttgatgtcattgtgcaggaaaacaatggcttcaccccgacgcctgccgtttccaatgccatcctggttcacaataaaaaaggtggcccgctggcagacggtatcgtgattacaccgtcccataacccgccggaagatggtggaatcaaatacaatccgccaaatggtggcccggctgataccaacgtcactaaagtggtggaagacagggccaacgcactgctggccgatggcctgaaaggcgtgaagcgtatctccctcgacgaagcgatggcatccggtcatgtgaaagagcaggatctggtgcagccgttcgtggaaggtctggccgatatcgttgatatggccgcgattcagaaagcgggcctgacgctgggcgttgatccgctgggcggttccggtatcgaatactggaagcgtattggcgagtattacaacctcaacctgactatcgttaacgatcaggtcgatcaaaccttccgctttatgcaccttgataaagacggcgcgatccgtatggactgctcctccgagtgtgcgatggcgggcctgctggcactgcgtgataagttcgatctggcgtttgctaacgacccggattatgaccgtcacggtatcgtcactccggcaggtttgatgaatccgaaccactacctggcggtggcaatcaattacctgttccagcatcgtccgcagtggggcaaagatgttgccgtcggtaaaacgctggtttcatctgcgatgatcgaccgtgtggtcaacgacttgggccgtaaactggtagaagtcccggtaggtttcaaatggtttgtcgatggtctgttcgacggcagcttcggctttggcggcgaagagagtgcaggggcttccttcctgcgtttcgacggcacgccgtggtccaccgacaaagacggcatcatcatgtgtctgctggcggcggaaatcaccgctgtcaccggtaagaacccgcaggaacactacaacgaactggcaaaacgctttggtgcgccgagctacaaccgtttgcaggcagctgcgacttccgcacaaaaagcggcgctgtctaagctgtctccggaaatggtgagcgccagcaccctggcaggtgacccgatcaccgcgcgcctgactgctgctccgggcaacggtgcttctattggcggtctgaaagtgatgactgacaacggctggttcgccgcgcgtccgtcaggcacggaagacgcatataagatctactgcgaaagcttcctcggtgaagaacatcgcaagcagattgagaaagaagcggttgagattgttagcgaagttctgaaaaacgcgtaaacacatttaataaaaaaagggcggtcgcaagatcgcccttttttacgtatgacaaacacagaattgcctgatgcgctacgcttatcaggcctacgaggatggtgcaatatattgaatttaagcgattttgtaggccggataaggcgttcacgccgcatccggcaaaaacaacgaacactttgtcaacaaactgagtagctcaaggaaatcccaatgaagaccaacaggagtctggtcgtcatagtgtcactaattaccgccacattactgctgactgcatgcgcccaacctgaacaatcatcattagctggcgactggttactgacccctaaagataaaaccagaggattaacgggtagcattgcggtaaatattgcacctttccggtgtaagacaaattgccgtggtgataacttacctgataatacccgccgctggcagttgtcaggcgggaacgaaaaagaacttacttatcttcataatatgtcagcacaagaaaaggtcggtttaaatcccggttggcaatgctacacctcattttttatgcgggtttgccagggcaagcccggcactcgaccgatagtcaatgaggattatgtcagcgaaagcggattttttggctcgatgatgcatgtcgggattattgagttacgacgctgccagtcagaaaattgccagcaagaattgaaagcgataaatacacattaaaatagtgagtccgggaatgaaacccggacctgaacatgtcttattgcgtgaatgtttctttcatttgatactgcatttcccagagttcagtaagcgaaataacttttcttgttcttgcttcttcactttgtacccataagaaagggtagaacgtgaaggcttccgttgccgataattttattacgtcttctcgccattgctgccatcgtacattttcatagaaggtatctaaatcaccggataatgcccactgaagaaactcagaatatccaacttccagactttcccaattcagcgtatctggcgcaaaataataaacgcagccagtatcttccccaagatcgccaccattaagagcaaaaattacccctgcgacatcgtcagcgatgggtaaagcccgcacgcctgcgaattcagggcgttgtgtccaacttactggatctcgtggcaaccgggggtgaccagatcctgctatgcgtaactaaccattatcaatcagcagacctccggagccatagacaagcgcacccatcggtgattttgttgtcacctgtaattgataaagtgcggtttcggctaaatctttattaaccggtaagagttcggtatggtttgtggcgtcttttaaccagttctggattattggccaggctgaatcttcagtatttactaactgattcatttcacgcatcgctacttgctccttgtgtgctacggtgtcatttatgatgaggaattgtatggaacattttttaaatattaagttccttatatttgaataaaaaatgactttatccatacattgccacttttttcaaagcataaaccgatacccaataccggtttcagtaataaaatggcgaggccgggccggatcctgttccagtttttgtcgcagatgccccatataattacgcaaatagttgctgtgttcgatcgcgtttagaccctacatctgccggatgcggcataaataacgaactatttgccaacaaacagaaagggcgatcattcaatcgcccttttttactttgttttattaaccgtgtttatttttcagttcaaagcgtggtgataccagaccatacagtgtccaaccaaggaaggtcacgatggaaccgtacagcatggcttcttccccggatgagtacagcgcataaaagctatacatcgcgccaacaaaagcaacaaagtttgcaactttcgcttttgaggggggcacattagcgaccttctgaataatgactaatgccgccattgacagaatatacggaatgatattggtcaccacggccaggttaaccagcacgttgaactgactgtttagcgacgggctaatggtcatcagtgccaatccactctgaataatcacaatggtcaacattccctgcaccggtgcatccactttggttacacgggagaaaattttagggaagtagccttcatcagatgaagatttaaacacctgggcaatggtgaactgccagccaagtagcgaaccgcagcaggacatcaccatcagcgccataatgactttacccacttccggcgtgaacatctgcgcgaaggccagaccaaatggtgccgttgaatttgccagctccatatttggcacaatcccggcaatcacgttggtggagacgatataaatcaccgccgcacctaacgtaccgccgagtaccgcgattggcacattacgttccgggttttccactacatcagtattcgcacacgcagactccagaccaagaaaagcccacagcgtcatagcgatggaagaacctaccgcactgaagaacggtgcatgatgcggattccaggaatcaacgtacagcgtcgggctaaaccagaaccagccaataatgcacagaccgacgaccggaataatgaccccccacacggtaatgctactgatttgcccggtaatgcgcgcaccaccaaagttagccacggtacaaatccacagcaccccgatggtcgcaagaccaatctgcactggcgacaaactcgcgccgagcagttcggtgccgtaaccaaccgccgaaatagcaatcgcgacgttagcaatcagcagtgagacgccgtaggtatagttcgccataaagttaccggatttaccgaaagcatactcggcataaccgcccataccgcctgatttacggctgaacataccgcattttgcgaatgcccatgccagtgccattgagcctacggctgtcaccagccaggagataattgagattgtcccgacttcggcaagctttgtcggcagcatgatgataccggagcccatcatgttgaccatcgtcagtatggttaactgaacgacgcccattttgttcgatttagcctgactcataatttttcccctttcaacagggtgctttgcgcatcacgaggcttgatgacatagcaccaaacttgcttacgaccatcatgttcttcgatatagacaccctgcagctccggtgcaaaacctggcagcaggttgatcccttcttccagagcgctgaagtaacgcagaacagcaccaccccagatttcacccggaacaacacacagcacacccggaggataaggaagcgcaccttcggcagcgatacggccttctgcatccggcagacgaaccagttccacttcaccgcgtaaataggcgtagttggcttcttgcggattcatgctgacgcgtgggaagtgctccttacggaacatctctttttgcagttgtttcacgttgtggcgggcatacaaatcatgcatttcctgacacaactgacgcagggtataaccggcgtagcgctcttcatgctgtttgtagatggaaggtagcacttctgctaatggcgcgtcggactcaagcagtttttcgaagcgtaccagcagggcaacaagttgctgaagtttggccatatcttctgccggagtcagcaggaagaggatggagttaagatcgcatttttccggcactacgccattttcgcgcaggaagttagcaagaatcgtcgcgggtacaccgaacgcttcatattcgccgttacgtgcatcaatacctggggttgtcagcaacagtttgcatggatcgacaaagtattgattctctgcatagccttcaaaagaatgccagtgttcccctggtacaaactggaagaagcgcagatcaaccgcaatttgcgctgtttcatacgactgccagggtttaccatccaccagttcaggtacgaacggacgaatatgctgacagttatcgaggatcagtttgcgggcattaatgccatttaccacacaatccatccacatattacgaccgctgacaccttcatgcattttggcgttgatattcagtgcggcaaacagcggatagaacgggctggtggaggcgtgcatcataaaggcgttgttcatgcgtttgtgcggtacataacgctgttgccctttgatgtggctgtcttttttatgaatttgtgaagtctgagaaaaaccagcctgttgtttatgcacagattgcgtaaccagaatacccggatcgttctcattaagatccagcaacagcggcgaacagtccgccatcatcggaataaactgttcatagccgacccatgctgagtcaaacaggatgtagtcacacagatgaccaattttatccaccacttggcgggcgttataaatcgtaccgtcgtaggtgcctaactgaatcacagcgaggcggaaaggacgagcctcttttgcccgctgcggtgcgacttccgcgatcagctcacgcaggtaactttcttcaaaacagtgcgcatcaatgccaccgataaagccatacgggttacgtgccgtttccagataaaccggtgttgcaccagcctgtagcaacgctccgtggtggttagatttgtggttattgcgatcaaacagcaccagatcacccggtgttagcagggcgtttaaaaccactttgttagaagatgaagtgccatttaaaacgaagtaggttttatcggcattaaacacttttgccgcatgttgctgtgcaatgcatggcgcgccttcgtgaatcagcagatcgcccatcgctacgtcggcgttgcacaagtcggcacggaacagcgcctcaccaaagtattccacaaactgattccccgccggatggcgacggaaaaattcgccgccctgatgaccagggcaatcaaacgcgctgttaccttgattgacataatcgaccagtgcgcggaagaaaggtgggcgcagttgagtttcataatggctggcagcggtttctaactggcgaccataaaattctcgtcgcgattcgcaattctcaaagacacccgaaatacggggcaaatactctgcgggtacacgttcttgattttcagtagcaataaataccgggatgccataacccgtggcatcgatttcatcgagttttccgcatgtaacatcgttgagcgataaaactattgccgccacatcgatattacgactttcattaatgtagatacattctcgctgcgtggtaaaacagtccgggcaagaatcactaaccgcaatttttaattttgacatttttcatctctttattttaggtaatagcaggtcctcaatttctcgaatgagaaatcgatcgtgccggaaaaaagcaaagttaccccgctgataaataaatcaggtagattgcttttttcagaatgcagaaacccttaccagtcaggtggctgataatacaagggttaacagagaatgagcactgcggaatacaggcatatgcctgtaatacagagagtcaggaagacctgtacgctgaagtgcccttagtcggtagactaacgggcattgaagaagtgaaagtcgaagctattgcgatgagcaaacttcataatatgagttgtccgccttatatggggcatagtgcggctgttattttccatttaatttacctttcctgatgtgaatgaaggtgaagatattctatccaggaaatacggttgaactgtgaaggtgatcaataaaaaatgatcaatcttaatttatttaatgatgagctttttactcagtaatataaaatattgaattgttatttttgtgtgttgtttaagataaaaagccgtatttattattacggctttaattaataaaaggcaggctgtattaaaattaatattcaaagcataaaccgatagccaataccggtttcagtaatgaaatggcgtgggcgggcgggatcctgttccagtttttgtcgcagatgtcccatataaatacgcaaatagtgactgtgttcgaccgcgtttggcccccacacctggttaaggagctggcgctgggtgagtacttttccggcattgttgagcagcaccgccagcaggcggaactcaattggtgtgagatgcacctcttcctcaccccggtgaatcacgcgggcggctaaatcgacggtaacatcggaaaattttaccagcggatcgggcgcggtggtggcagagtggcggcgtaatgcgacgcgcagacgggcctgcaattcgccaatgccaaacggcttactcagataatcatccgctccggcatccagcgcggcgattttgtcgctctcttcgctgcgtgcggaaagcacaatcaccggcaccgcgctccactggcgcaggtcgcggataaactcaatcccatcaccatcgggcaggccgagatcgagaataatcaaatctggcttacgggttgccgcttccagcaagccgcgttgcagcgtttcggcctcaaagacgcgcatcccgtcgccctccagcgccgtgcgcagaaagcgacgaatagcctgttcatcttcaacaatcagaacgtttgtcacatatcctcatgaaattcttcaagttcaggggcagtttgctggggaagtgtaacacgaaaacaggcaccaccttccggtcggttgaacgcggtaatagtgcccccgtgtacatccactatcgcccgacaaattgccagtccaagccctacccccggtactgccgactctttattcccgcgagcaaacttatcaaatatcgtctgctcctggcctggcggaagaccggggccgttatcccagacatccagttgtagattttcgccctcaacgtgggcatcgataccaatttcggcctgcgcacccgcatatttcaccgcgttctccagcagattaatcagcacccgttcaaagagtggcccgtcaacgtggattaaggtcagcggttctggcagagaaagattgatgggcgacgataaacccggttccagcatttgcagcgcgctgccgactacttcttccagcgttaaccactctttcttcaaattaaagccgccggactgaattcgcgccatatccagtagattattcaccagtcgggtagtgttcagcacatgctgacggatctcgctggcctggcgggcgtggggtgatccttcgcttgccagatcgagcgttaagatttctgcctgaccaaacagcaccgtaagcggcgtgcgtaaatcatgcgaaagcgccgccagcagggcgttgcggatctgttcacgttcgcttgccatccgcgcctgttcttcgctggcggttagcgtcagccgctcaagggcattggcgactaacagcgtaaacgtctccagcaggcgctgctgttccgggatcatcaactggcgcagattccccggctccaccaccaccagcccgtaggttttctcgccgctttttagcggcaaaatctggtacggtacaccgggtaacgtgtcggtgcccgcgcccgcaggcaggcctttatcaaaactccactgcgcgatggcatcgtcccacggcgtcattccttgcggatgtgttaacggctgcaatttaccgttgtcatcgggcaacaacacctgactgcgggcatgaaacgtggaggcaataaattgttcgctggtggcagcgatatcctgcggactgcggcccaccgccagagctttcgacatttcatataagtgccgtgtgcgttgctcgcggtaacgggctacccgcgcctgataacgcacgccagcagtaaggttcccgatcaccagcccgacggttaacatcaccgcgaaggtcagcagatattgcacatcagagacggcgagcgtgccgcgtggggcgataaaaaagagatcgaaactcactacattaatgacggtggcaaccactgaaggccagcgtccataaaatagcgccaccaccaccacgccaagcagatacagcatcaccaggttggcggcatcaaacgccatcagccactgcatggcaattaaggtgataacggcgcataacgcggcggcaaccacgcatccctgaatttgtacacgccacttgtctttaaaagagcggttatccggcgcgttgttaatcgtgcgggcgggtggttcatcaagcgcgaccagcacctgatcgagatcgggggcgatgcgcgccagtcggtcagcaaacgtttcccgacgccaccagcggcgcgaggccgggcgaccgagaataatcttgccgagattatgttcacgggcataacgcactaccgctttctcttccgctggatcagaaagtgttgccgtctccgcgcccagttcctgcgccagacgtaaggcgctgagaattgcccgacgttttttttccggtaagcggtgcagggcaggggtttcaacatacaccgcgtgccagacgctacccagccgtgacgccagccgcgccgctgcgcggaccagtttttcgctgccggtgttatggccgatgcataaaaggatcgcgtcgcgcgtgtgccacactttctcttcgccaggatgcccccgccaggcgcgcatttgctcatcaacgcgatcggcagtacggcgcagtgccagttcgcgcagggcgatcagattacctttgcggaaaaaatgttcaatggcgcgctccgcctgcccggcaatatagactttgccttctttcagccgctggcgcagatcgtccgggggcaagtccaccagcaccacgtcgtcggcggcatcgaaaaaaggatcgggcacggtttcccgtacctgaattccggtgacgccgctgaccacatcattcagactttccagatgctgaacgttgacggtagtgaaaacatcaatgccagcttccagcagttcttcgatatcctgccagcgtttgggatgacgggaacctggcgcattactgtgcgccagttcgtccattaagatcagcgccgggcggcgggcgagggcggcatcgagatcaaactcgctgatatgccgcccacggtacgcctggcgttttaacggcagaacagccagcccttccagcatggcggcggtatcttttcgcccgtgggtttctaccacgccaaccacaatatccagcccttgcgcccgcagtcgctgggcttctgccagcatcgcccaggtcttcccgacgcctgcacaggcaccgaagaaaactttcagcttcccccgatgcggcgcggcagtttgttccagcagacgatcggggtcgggacgtaagggttcgttattcatcaagtttatccagcgccagattgagttcaacaatgttgacaaccggctggccgatatatttcaccagcggttgttggctgtattttgcgatcagttgcgtgagctgttcaacgctgagattacgcgctttcgccacgcgtgggatttgccaggccgccgcttgcggggtgatattattgtccagcccgcttgccgatgccgtcaccagttcaaccggaacgctcgcgctggcatccgggttagcggcccgtaatgcagcaacgcgtgcggctattagtttatccagctcagggttactgaccgccagattgctcccgccagaagcctgtggattatagggcatttctgccgttgccgacgggcgaccatgaaaatagccgttgccggtaaaattctgcccgattaatgccgaaccgcgcaccgtatcaccttcacgaatcaacgaaccattggcctgccagggaaaccaccattgccccagtacggtggtcagcagcgggtaaacgccgccagtaatcaataacagaaagataaatgttgataatgccggacgtaatccactcatggtaaacctcacaccagaccgcaaacggtcagcagtaaatcaatgactttgataccgataaacggcaccagcagcccacccagaccgtaaatccataagttacggcgcaacatggcagaagcggtaagcggtttataactcacgccttttaacgccaggggaatcaaaaagacgataatcaaggcgttgaaaatcaccgcactgaggattgcggagtcgggcgaatgcaggcacatgatgttcagcgcatttaactgcggatacgttgccgcgaatgccgccggaataatggcgaagtatttcgccacatcgttggcaatgctgaaggtggtcagcgagccacgggtcatcagcatctgtttgccaatgtgcaccacctcgatcaacttggtcgggttagagtcgagatcgaccatattgcccgcctctttcgccgcctgggtgccggagttcatcgccaccgcgacatctgcctgcgccagcgccggagcatcgttggtgccgtcgccggtcatcgctaccaaacgaccttccgcctgatactgacggatcaatgccagcttggcctccggtgtcgcttcggcgagaaaatcatcgacacccgcttccgcagcaatcgcggcggcagtcagacggttatcgccggtaatcatcaccgttttaatgcccattttgcgcagctgggcgaagcgctctttaataccgcctttgacgatatctttcagcgcaataacgcccagcacacgagaaccttccaccaccaccagcggcgtggctccctgacgcgcaacctgatcgactttttgatcaacatcggtagggaagtgaccaccgttagcctcaacatggcgacgaatggcatcgacagaacctttacggatcatgcggttgtcgatgttgatcccgctcatccggctttgcgcagtaaacggtacaaaggtggcatggagcgactgcacatcgcgctcgcgcaggttaaaacgctgcttggcgaggatcacaatactgcggccttccggcgtttcatcagccagcgaagccagttgtgcggcgtcagccagcgttttttcatccacgccctgcgcggggataaactccgacgcctgacggttaccgagtgtgatggtgccggttttatccagtagcagaacgtcaacgtcacctgccgcttcaactgcacgtccgctggtggcaatcacattcgcgcctagcatccggctcatcccggcgacgccgatcgctgacaacaggccgccaatagtggttgggatcagacagaccagcagcgccaccagtaccgttacgctgactgcattaccgccccacgcggaaaacggccacagcgtggcggttgccagtaaaaagacgatagtcagggcaatcagcagaatggtcagggcaatttcgttcggcgttttgcgtcgctgtgcgccttccaccatcgcgatcatccgatccagaaatgtctcgccggggttaacgctacactcaatcaccagccagtcagaaagaatacgcgtgccgccggtgacggaggcaaaatcgccgccggattcacggatcaccggtgccgattccccggtgatggcgctttcatcgaccgatgcacccccttcaataacttcaccatcgcaggggataatatcgccagcttctaccagtacgatatcgcctttacgaagttggtcggcaggaactttgtccgccgcagcgccatatttcggctcacgcagcttgcgggcaaaggcagtttttttcacccctttcagactgttggcctgcgctttactgcggccttctgccagcgcctcggcgaaattagcgaacagtacggtgatccacagccaaccgctaatggccgcgctaaacagcgcattgccgggcatcgcaccgcttgccatcgcgatgctaatacaggtggtcagcagactgccgatccagacgataaacatcaccggattgcgccattgcgcctgcgggtttaattttttcaccgcttctttcagcgcctgaacgacaagtgttggttcgaatagcgccagttgtttacgactcatattcagtgctcactcaatatcatcaggagagatattccgccaccggaccaagcgccagggcagggataaaggtcagtgcgccaaccagcaacacggtgccgattaacaggccaacaaacagcgggccgtgcgttggcagcgtgccggagctggcggcttggctctttttactcaccagcgaaccggcaattgccatcaccgggataatcaccccgaagcgaccgacaaacatgcagaacgccagtaaacagttccagaacggagagttggcgcttaatccggcaaaggcgctgccgttgttgttagcggcggatgacacggcgtacagcacttcgctaaaaccatgcgggccagggttgagcatggcgctacgtccggcgtcggtcatcatcgccaacgccgcgcccatcagcaccagcgtcggggtaaccagaattgccagtgcagtcagtttcatctcgcgtacgtcgatttttttacccagatattccggtgtacgaccaatcatcagcccggcaataaacaccgccagcaggacaaacagcatcatgccgtaaagaccagaaccgacaccgccgaacaccacttcaccaatttgcatcagccacatcggcaccatgccaccgagagcggtaaacgaatcatgcatcgcaatcaccgcgccacaggaagccgccgtcgtcacgaccgcaaacaggctactgaccagcacgccgaaacggctctctttaccttccatattgatgctgctgtccgtgcccagtgccagcagatgaggattaccctgaacttctgcccacatcaccacgcctacgcagatgacaaaaatcactgacatcgcccacagcaacatgcgcccctggcggcgatcgcccatcacttcaccaaaggcaaagcacagcgccgttgggatcaagaagatcgccagcatctgcacgaagttggtcagtgcggttgggttttcaaacggatgcgacgagttggcattaaagaagccaccgccgttagtaccgagcatcttgatcgcttcctgagaagctacaggccccatgggtaacagctgttgcgctccttcaacggtattcacagcctgataaggcagaaagttttgcagcgcaccttgttgaataaaaaacagtgcaatcaacaacgccacagggactagcacccataacgtgatgcgtagcagatcgacccaggcattcccgagcgtgctcatgctctggcgggtaaacgcacggatgagggcaaaaatcaccgcaatcccgctggcggcagaaagaaagttttgcaccgttaagcccgccatctggctgaaatagctcaacgtggtttcaccgctataagattgccagttggtattggtgacaaagctgacggcggtattcagcgccagatcccacgacagccctggcaactgctgtggattaagcggcagatagtgctgaccgagcaacataaaaaacagcaccgccagccccagcatgttcaggccgagaatggcacaaagatattgcttccagttcatctcacggtcagagacgccaagtgcgcgaaaaagtacgcgctcaacgcccgttgtaccgggaagaggaatgtcattaatcagccgcgccagcccgctgcctaaaggacgcgccagcaccattaacaccagtaaaaacgtggcgatcagtaagaacccttgcgcagccatcagaacgcctccgcattgatcagggcataaaccagataacccagtaataaaaacaccagcaatacgccggttatcacgcctgcactcacagtgcacctccagtggcctaaaagtgataccggaagggtagaattctggctgcaaagatttcgcaaaaatctgcgggcggggtgtaaaaaaagtataaaaatggcaaaagccatgatttaactaatgtttagtattaatttaacttttgtgtaacttaattacaggatgaatgtaaataaaccatcaataagcaaaaataagtggtcggatgagtagtaaaattacacaaaaggcggtactattttcatcagataaacaaattcatttttccggtgccattcaccgggtagatacaaaagggggagaaaagtatggaactctacagagaatatcctgcatggcttatctttttacgccgtacttatgcggttgcagcgggcgttctggcgctgcctttcatgcttttctggaaagaccgcgcccgcttttacagctacctgcatcgcgtctggtcgaaaaccagcgataaaccggtgtggatggatcaggccgaaaaggcaactggtgatttttattgattgctgagttttgaatacattgaaaaccgccagcggaaacgctggcggttttttgtatcaggaagatgttcagaggaatatttagacatcgttataccaatcgaaacatatattcatgaaatatatataaatattttcctaattgttcttatctgacagatatctcacttaaggctttcttataaatctgtagggtttcgcctgtcagcagacaaataacccgataaaacaaggatgagcagatgagcggaaaaccggcggcgcgtcagggcgacatgacgcagtatggcggtagcattgtccagggttcagccggggtacgcatcggtgcccccaccggcgtggcctgttcggtgtgccccggcggggtgacgtccggccatccggtcaatccgctgctcggtgcaaaggtccttcccggtgaaaccgacatcgccctgcccggcccgctgccgttcattctctcccgcacctacagcagttaccggacaaaaacgcccgcgccggtggggagcctcggccccggctggaaaatgcctgcggatatccgcttacagctgcgcgataacacactgatactcagtgataacggcggcagaagcctgtattttgagcacctgtttcccggtgaggacggttacagccgcagcgagtcactgtggctggtgcgcggcggcgtggcgaaactggatgaaggtcaccggctggccgcactctggcaggcgctgccggaagaactccgcttaagtccgcatcgttatctggcgacaaacagtccgcaggggccgtggtggctgctcggctggtgtgagcgggtgccggaagcggatgaggtgctgcctgcgccgctgccgccgtaccgggtactgaccgggctggtggaccgcttcgggcgcacacagacgttccaccgcgaagccgccggtgaattcagcggcgaaatcaccggcgtgacggatggtgccgggcgtcacttccggctggtactgaccacgcaggcgcagcgggcagaagaagcccggcagcaggccatttccggcgggacggaaccgtccgcttttcctgataccctgccgggttacaccgaatatggccgggacaacggcatccgtctgtctgccgtgtggctgacgcacgacccggaatacccggagaatttacctgccgcgccgctggtgcgctatggctggacgccccgcggcgaactggcggcggtgtatgaccgcagcaatacacaggtgcgcagctttacttacgatgataaataccggggccggatggtggcgcaccgtcacacgggccgaccggaaatctgttaccgttacgacagcgacgggcgggtgacagaacagctaaacccggcaggcttaagttacacgtatcagtatgagaaggaccgcatcaccatcaccgacagcctgaaccgccgtgaagtcctgcacacgcagggtgaaggcgggctgaagcgggtggtgaaaaaggaacacgcggacggcagcgtcacgcagagtcagtttgacgcggtgggcaggctcagggcacagacggatgccgcaggcaggacaacagaatacagtccggatgtggtgacgggcctcatcacgcgcatcaccacgccggatggcagggcatcggcgttttactataaccaccacagccagttaacgtcagccaccgggcctgacgggctggaaatacgccgggaatatgatgaatggggccgtctgattcaggaaactgcccctgacggcgatatcacccgctaccgttatgataatccacacagtgacttaccctgcgcaacggaagatgccaccggcagccggaaaaccatgacgtggagccgttacggtcagttgctgagcttcactgactgttccggttatgtaacccgctatgaccatgaccgttttggtcaggtgacggcggtgcaccgcgaggaagggctgagtcagtaccgcgcatacgacagccgtggacagttaattgccgtgaaagacacgcagggccatgaaacgcggtatgaatacaacgccgccggtgacctgaccaccgtcattgccccggacggcagcagaaacgggacacagtacgatgcgtggggaaaagccatctgtaccacgcagggcggtctgacgcgcagtatggaatacgatgctgccggacgggtcatccgcctgaccagtgaaaacggcagccacaccaccttccgttacgatgtactcgaccggctgatacaggaaaccggctttgacggccgcacacagcgttatcaccacgacctgaccggcaaacttatccgcagcgaggatgaggggctggtcacccactggcactatgacgaagcagaccgcctcacgcaccgcaccgtgaatggcgaaaccgcagagcggtggcagtatgacgaacgcggctggctgacagacatcagccatatcagcgaagggcaccgggtgacggtgcactatggttatgacagtaaaggccgcctcgccagtgaacacctgacggtgcatcatccgcagacgaatgaactgctctggcagcatgagaccagacatgcgtacaacgcacagggactggcgaaccgctgtataccggacagcctgcccgccgtggaatggctgacctacggcagcggctggctgtcaggcatgaaactcggcgacacaccgctggtggagtacacccgcgaccgcctgcaccgggaaacgctgcgcagcttcggccgttatgaactcaccaccgcttatacccctgccgggcagttacagagccagcacctgaacagcctgctgtctgaccgcgattacacctggaacgacaacggcgaactcatccgcatcagcagcccgcgccagacccggagttacagctacagcaccaccggcaggctgaccggcgttcacaccaccgcagcgaatctggatatccgcatcccgtataccacagacccggcaggtaaccgcctgcccgacccggagctgcacccggacagcgccctcagcatgtggccggataaccgtatcgcccgtgacgcgcactatctttaccggtatgaccgtcacggcaggctgacagagaaaaccgacctcatcccggaaggggttatccgcacggatgatgagcgcacccaccggtaccattacgacagtcagcaccggctggtgcactacacgcggacacaatatgcagagccgctggtcgaaagtcgctatctttacgacccgctgggccgcagggtggcaaaacgggtatggcggcgtgaacgggacctgacgggctggatgtcgctgtcacggaaaccgcaagtgacctggtacggctgggacggcgaccgcctgaccacgatacagaacgacagaacccgcatccagacgatttatcagccggggagcttcacgccactcatcagggttgaaaccgccaccggtgagctggcgaaaacgcagcgccgcagcctggcggatacccttcagcagtccggtggcgaagacggtggcagtgtggtgttcccgccggtgctggtgcagatgctcgaccggctggaaagtgaaatcctggctgaccgggtgagtgaggaaagccgccgctggctggcatcgtgcggcctgacggtggcgcagatgcaaagccagatggacccggtatacacgccggcgcgaaaaattcacctgtaccactgcgaccatcgcggcctgccgctggcccttatcagcacggaagggacaacagcgtggtacgcagaatacgatgaatggggtaacctgctgaatgaagagaacccgcatcagctgcagcagcttatccgcctgccggggcagcagtatgatgaggagtccggcctgtattacaaccgccaccgctattatgacccgctgcaggggcgatatatcactcaggatccgattgggctgaaagggggatggaatttttatcagtatccgttgaatccgatctcaaatatagatccattaggattagaaacactaaaatgcattaagccactgcattcaatgggcggaactggtgaaagaagcggtccagatatatgggggaatccgttctatcatcaatatctttgtgtcccagatggtaaaggggactatacttgtggtggccaagaccaacggggagaatcaaaaggagatggtctatgggggccaggtaaagcaagtaatgatacaaaagaagctgctggccgttgtgacctcgttgaaaccgataatagttgtgtggagaactgtttaaaagggaagtttaaagaggtaaggccgcgttattctgtattgcctgatatattcacacctataaatttagggctatttaaaaactgccaagactggtctaatgattctttagaaacatgtaagatgaagtgctccggaaataacattggacgttttattagatttgtattcaccggagtgatgtaatgaaatatattatttttttattcagagctatatggctggctttatcgcttttaatactattcttttccatgcatagactttcactattagactccactcgtgatgtgagcgagttaattagtctcatgtcttatggaatgatggtaatatgttttccaacaggcatagtattctttattgctctaatatttatagggactgtatcagacattattggcgtaaggattgatagtaagtatattatggcgataataatatggctttattttctgtcaggagggtatattcaatggtttgtattaagtaagcgcattataaacaaataaattaagttaattgctcttattattatatgtaacctgggcattgatatcccgtatgccacagacccggcaggtaaccgcctgcccgacccggagctgcacccggacagcaccctcagcatgtggccggataaccgtatcgcccgtgacgcgcactatctttaccggtatgaccgtcacggcaggctgacggagaaaaccgacctcatcccggaaggggttatccgcacggatgatgagcgcacccaccggtaccattacgacagtcagcaccggctggtgcactacacgcggacacaatatgcagagccgctggtcgaaagccgctatctttacgacccgctgggccgcagggtggcaaaacgggtgtggcgacgtgaacgggacctgacgggctggatgtcgctgtcacggaaaccgcaagtgacctggtacggctgggacggcgaccgcctgaccacgatacagaacgacagaacccgcatccagacgatttatcagccggggagcttcacgccactcatcagggttgaaaccgccaccggtgagctggcgaaaacgcagcgccgcagcctggcggatacccttcagcagtccggcggcgaagacggtggcagtgtggtgttcccgccggtgctggtgcagatgctcgaccggctggaaagtgaaatcctggctgaccgggtgagtgaggaaagccgccgctggctggcatcgtgcggcctgacggtggagcagatgcaaaaccagatggacccggtgtacacgccggcgcgaaaaatccacctgtaccactgcgaccatcgcggcctgccgctggcgcttgtcagcacggaaggggcaacagaatggtgcgcagaatacgatgaatggggcaacctgctgaatgaagagaacccgcatcagctgcagcagcttatccgcctgccggggcagcagtatgatgaggagtccggcctgtattacaaccgccaccgctattatgacccgctgcaggggaggtatatcactcaggatccgattgggctgaaggggggatggaatttttatcagtatccgctgaatccggttcagtatatagattcaatgggactggcatcaaaatatggacacttaaataatggcggatatggagcgagacccaacaaaccgcctacgcccgatccaagtaaattgccggacatagcgaaacaattaagactgccatatcctattgaccaggccagtagtgcgcctaatgttttcaaaacattcttcagagcattaagcccttacgactacacactgtattgcaggaagtgggtaaaaccaaatctgacttgtacgccacaggatgattcccagtatccagggatggatacaaagacagcaagtgattacctgccacagacaaattggccaacaactcaattaccaccaggatatacttgtgcagaaccctatttattcccagacattaataaacccgatgggccagcaacagcagggatagatgatttgggtgaaattttagctaagatgaaacagagaacatcgagaggaataagaaaatgaaaagagttttgttctttttgctgatgatatttgttagttttggtgttatagctgattgcgaaatacaagctaaagatcatgattgttttactattttcgctaagggtactattttttccgcgtttcctgtcttaaataataaagccatgtggagatggtatcagaatgaggacatcggtgagtattattggcaaacagaactgggtacatgtaaaaataataaattcacaccaagcggggcgagactcttaattcgcgtcgggtcactacgccttaatgaaaatcatgccatcaaaggaacgttgcaggagttgataaatacagcagaaaaaacggcgtttctcggcgatcggtttagaagttatataagagcgggtatctatcaaaaaaagagcagtgatccagttcagttgttggcagtccttgataattcaatcatggtaaaatattttaaagatgagaaaccaacttatgctcgaatgacagcacatctcccgaacaaaaatgagtcttacgaatgtttaataaagatacagcatgaactaattcgtagtgaagagaaataaaatctcttcctgagaaaacaaattaatcattgtgaaaaattatataactcatggaataggtgtttattttgcgttccatttgcagggaaagatcacgtaacgctacttttttgtactaaataattcgaattttaagttcaacaattgagatactacttattgtctaaagctgtttttcatagcttatacatgatcaaatactccttacataaataaggtgaacaaatggaacttaaaaaattgatggaacatatttctattacacccgattacagacaagcctggaaagtggtgcataaattgtcagatattctactgttgactatttgtgccgttatttctggtgcagaaggttgggaagatatagaggatttcggggaaacacatctcgattttttgaagcaatatggtgattttgaaaatggtattcctgttcacgataccattgccagagttgtatcccagggaaagatcacgtaacgctacttttttgtactaaataattcgcattttatgtttaaaaattgagatattccttattacctaaagctgtttttcatagcttatacatgatcaaatactccttacataaataaggtgaacaaatggaacttaaaaaattgatggaacatatttctattattcccgattacagataagcctggaaagtagagcataaattgtcaggcatcctactattgactatttttgccgttatttctggtgcagaaagttgggaagatatagaggatttcggggaaacacatctcgatttcttgaagcaatatggtgattttgaaaatggtattcctgttcacgatactattgccagagttgtatcctgtatcagtcctgcaaaatttcacgagtgctttattaactggatgcgtgattgccattcatcaaatgataaagacgtcattgcaattgatggaaaaacgctccggcactcttatgacaagagtcgccgcaggggagcgattcatgtcattagtgcgttctcaacaatgcacagtctggtcatcgggcagatcaagacggataagaaatccaatgagatcacagctatccctgaacttcttaacatgctggatattaaaggaaaaatcatcacaactgatgcgatgggttgccagaaagatattgcagagaagatacaaaaacagggaggtgattatttattcgctgtaaaaggaaaccaggggcggcttaataaagcctttgaggaaaaatttccgctgaaagaattaaataatccagagcatgacagttacgcaatgagtgaaaagagtcacggcagagaagaaatccgtcttcatattgtttgcgatgtccctgatgaacttattgatttcacgtttgaatggaaaggactgaagaaattatgcgtggcagtctcctttcggtcaataatagcagaacaaaagaaagagccagaaatgacggtcagatattatatcagttctgctgatttaaccgcagaaaagttcgccacagcaatccgaaaccactggcacgtggagaataagctgcactggcgtctggacgtggtaatgaatgaagacgactgcaaaataagaagaggaaacgccgcagaattattttcagggatacggcacatcgctattaatattttaacgaatgataaggtattcaaggcagggttaagacgtaagatgcgaaaagcagccatggatagaaactatctcgcgtcagtccttgcggggagcgggctttcgtaatctttccctgctttttgtactaaataattcgcattttatgtttaaaaattgagatattccttattacctgaagctgttttttattgcttatacatgatcaaatacttcttacataattaaggagaacaaaatggaacttaaaaaattgatggaacatatttctattatccccgattacagacaagcctggaaagtggaacataaattatcggatattctactgttgactatttgtgccgttatttctggtgcagaaggctgggaagatatagaggattttggggaaacacatcccgattttttgaagcaatatggtgattttgaaaatggtattcctgttcacgataccattgccagagttgtatcctgtatctgtcctgcgaaatttcatgagagctttattaactggatgcttgactaccattcttcagatgataaagacgtcatcgcaattgatggaaaaatacaccggcattcttatgacaagagtcgccgtaagggagcgattcatgtcattagtgcgttctcaacaatgcacagtctggtcatcggacagatcaagacggataagaaatccaatgagatcacagctatccctgaacttcttaacatgctggatattaaaggaaaaatcatcaaaaccgatgcgatgggttgccagaaagatattgcagagaagatacaaaaacagggaggtgattatttattcgctgtaaaaggaaaccaggggcggctaaataaagccttcgaggaaaaatttccgctgaaagaattaaataatcccaagcatgacagttacgcaattagtgaaaagagtcacggcagagaagaaacccgtcttcatattgtttgcgatgtccctgatgagcttattgatttcacgtttgaatagaaagggcagctatggttagaaactacctgacgtcagtccttgcggggagcaggctttcgtaaatttgtcctgctacaacaggattaacttcacaaatatcatttctcaacgtctacacttactcctgtaaaccgctcaggagcagtaatgaatctacaacgatttgatgacagcaccctaatccgtatctttgcccttcatgagttacatcgactgaaagaacatggcttaacgcgcggggcgcttctcgattatcacagccgctataaactcgtctttctggcgcattctcagccggagtaccgcaaacttggcccgttcgtggctgatattcaccagtggcaaaatctggatgactattacaaccagtaccgccaacgcgtagttgttttgctttctcaccccgccaacccgcgcgatcacaccaatgttttgatgcacgttcagggttattttcgcccgcatattgattccacagaacgccagcagctggctgcgcttatcgacagttatcgccgtggcgagcaaccacttcttgcgccgctgatgcgtatcaaacactatatggcgctttatcctgacgcctggctttcagggcagcgttatttcgaactttggccgcgtgtgattaacttgcgccattcaggagttttatgactacccatctggtctggtttcgccaggatttacgtctgcacgataatctcgcactggctgccgcctgccgcaattcgtctgcacgcgtgctggcgttgtatatcgctacaccacgccagtgggcgacgcataacatgtcgccgcgtcaggctgaacttatcaatgctcaactgaatgggctacaaatagcgcttgcggaaaaaggtattcctttattgttccgtgaagtggatgactttgtcgccagtgtcgaaatagttaaacaggtgtgcgcggaaaacagcgttacccacctgttttataactatcagtatgaagtgaatgagcgggcgcgggatgtggaagttgaaagagcgctgcgtaacgtggtgtgtgaaggatttgatgacagcgtgatcctgccgcctggcgcggtgatgaccggtaatcacgagatgtacaaagtctttacgccttttaagaatgcctggctgaaacggctgcgggaagggatgccggagtgcgtcgctgcgccaaaagttcgtagtagcggatcgatagagccctcgccatccattacgctgaattatcctcgtcagtctttcgatactgcgcattttccggtggaagaaaaagcggcgattgcgcaattacgccagttttgccagaacggtgccggagaatatgagcaacaacgagattttccggcagtggaaggcaccagccgtttgtcggccagcctggcaacgggcgggttatcgcctcgccagtgcttgcatcgcttgttggctgaacagccgcaggcgctggacggtggggccggtagtgtctggcttaatgagctgatctggcgcgagttttaccgtcacctgataacgtatcacccctcgttgtgtaaacatcgtccatttattgcctggacggatcgtgtacagtggcagagcaatcccgcacatttacaggcctggcaggaaggcaaaacgggatacccgattgttgatgccgctatgcgtcagcttaacagcactggctggatgcataacaggctacggatgattacagccagttttctggtgaaagatttattgatcgactggcgcgaaggcgagcgatatttcatgtcgcagctgattgatggtgatttggcagccaataacggtggctggcagtgggccgcttcaaccggaaccgatgcagcgccgtattttcgtattttcaacccgacaacccagggcgagaaatttgatcatgagggcgagtttatccgccagtggctaccggaactgcgcgatgtgccagggaaagtggtgcatgagccgtggaagtgggcgcagaaagcaggtgtgacgctggattatccgcaaccgatagtcgagcacaaagaagcgagagtacaaacgttggcagcgtatgaggcggcgcggaaggggaaataacagacgcgtcaggcaatcgagcccagatgccggatgcggcgtgaacgccttatccagcctacaaatttgtgcaaattcaataaattgcaggaaatacgtaggcctgataagacgcgtcaagcgtcgcatcaggcatcggtgctggcctattaagactccagcgccagcgcgcggtttctgaatttcagcgcctgatacagccaaatcatcagtaccagtcctacacacgccagtgcgccccaggtaatttgatcaaatacttcaatatatgcattgatggagtagttgatcgccccggaagcatcaaacgaagcctgcgatgtctgatcggcaatcacgcccgccagatagttcgcgatcgcgccagaaagcagcatgtagatgccggttaatacgccggtcacaccggggatttcaatgcgcgtaatttgcgacatggcaaccgggtcgataaacagttccgcaaagcccatcaccgccaggcctaataccatcagtggcagagaagagtgaccatacattgcggaccagcgggcgcttaaggtcagaatgcagaatccggcgctcatcaggccaaggccaagagcaaatttcccccagatgcgcacggtacgattacccgcgacactctcttttaccacccacgccaggaacacaccgcacagcataactgcgaaggcattaatcgactggaacatcgcggtcggaacggtataaccaaacatatcgcggttaacgaagcggtcgatataaaggctaatcgagctaccgccctgttgtgcgaaggcccagaacaacatactgaagaaggtgagcgtcacaatcagccccagctccttccgctgtttctggttttctgctttgcgataaatttttgccagtacacccaggccaataatagtcgcgacaattaaggcgtataccgaccactctttccagaacagtatggtaatcagtgcaggcgttgccaccagcagaaccagcagccatccccagttcggcaggagaaagtttgtcgcacgcagtacttttttgttaacgccgcgggtatgagtgaaatgacgattgccacataagaaaatgaccagacccgcgatcatgccaaccgccgccaggccaaagcccatcgcccagctgtactcttcctgggcgtaaccacaggcgataggtgcgataatagaccccacgttacccgccgcatacatcagcgagaaaccgccatcacgacgcggatcggttggctcatacagctcgccgagcagacagcttacgttagatttaaacaggccatagccgcagacgataatcgccagggacagatagaggaatgacggatggatctcactggcacccagcaccacatgaccgatcgccatcaacaacgcccccagcatcaccgccatgcgattgccgagaactttatccgccaaaaagccaccgaggattggcgtgacatacaccagcgaacagtaggcgctaaataactcgtaggcgtgagtatcgttgtattttagttgattggtgagatagagaatcagcagggcacgcatgccgtaaaagctaaaatattcccagatttgcagcgcaacgacatagtaaatagcgcgcggctgtgatgcgtgtttattcataataattccacaattgacggcaacgtcacgtaatagttgcgcggcgtgcttgtgtttccttaaagttaaaactttgatacagatctgattatttatgcaatatgctgtctgattgcataaatatacattagctgaagcgtgatgatataaacaatttgcgtcttttggcgtcgggtttgtttcttaatatgtcaaaagattggctatcgacgaactggcgaggtaacgctatgttaacggtgtagctatcagaatacggaaggcgcgaagatgaaaaacaccgaactggaacaactgattaacgaaaaactgaacagcgcggcgattagtgattacgcgccgaatggtttgcaggtggaaggcaaagagacggtgcaaaaaattgttaccggtgtcaccgccagccaggctttgctcgatgaggcagtgcgtctgggcgcggatgcggtcattgtgcatcatggctacttctggaaaggagagtctccggtcattcgcggaatgaagcgtaaccgtttaaaaacgttgctggcgaatgatatcaacctgtatggctggcatttgccgcttgacgcacatcctgagctgggcaataacgcacagctggcggcgttactggggatcacggtcatgggcgaaattgagccgttggtgccgtggggcgaactgaccatgcctgtgccgggactggagctggcttcctggattgaagcgcgtctgggacgtaagccgttatggtgtggcgataccggacctgaggtggtccagcgcgtcgcctggtgcacgggcggcgggcaaagttttatcgatagcgccgcgcgttttggcgtggatgcttttattactggcgaagtttctgaacagaccattcattcagcccgcgagcagggattgcatttttatgctgcaggtcaccatgccactgaacgtggtggtattcgcgcattgagcgagtggctgaatgaaaataccgatcttgatgtgacctttattgatattcctaatcctgcataacgaataatcagagggatcgaaagtgcaacgagcgcgttgttatctgataggtgaaacggcggtagtgctggaactggaaccgccggtgacgctggctagccagaaacggatctggcgactggcgcagcgtctggtggatatgccgaatgtggttgaagccattcccggcatgaacaatatcacggtgattttgcgtaatcctgagtcgctggcgctggatgccatagagcgtttgcaacgctggtgggaggagagcgaggcgctggagccggagtctcgctttattgaaattccggtggtttacggtggtgcaggcggaccggatttggcggtggtcgcggcgcattgcgggttgagcgaaaaacaggttgttgaattgcactcctccgtggaatacgtggtctggtttttaggttttcaaccgggcttcccgtatctcgggagtttgccggaacaactacacacgccacggcgcgctgaaccgcgcttactcgttccggcaggttctgtcgggatcggcgggccgcagactggtgtttatccgctggcaacgccgggtggctggcagttgattggtcatacctcactcagcctgtttgatccggcgcgtgacgaacccatcttattacgtccgggagacagcgtgcgctttgtaccgcagaaggagggagtatgctgaagattattcgtgcgggcatgtataccactgtgcaggatggcggtcgtcacggttttcgccagtcgggtatcagccactgcggcgcactggatatgcccgcgttacgcattgctaacctactggtgggtaatgacgccaatgcccccgcgctggagatcacgctcggtcagttaactgttgagttcgaaactgatgggtggtttgctctgacgggtgccggttgcgaagcgcggctggatgataatgccgtctggaccggctggcgattgccgatgaaagcaggccagcgtttaacgcttaaacgcccgcagcacgggatgcgcagttatctggcggtcgcgggtggtattgatgttccgccggtaatgggctcatgcagcaccgatctcaaagtggggattggcgggctggaaggccgtttactgaaggatggtgaccgactcccgattggcaaatcgaagcgtgattctatggaagcgcagggcgttaaacagctgctgtggggcaaccgcattcgcgccttgccggggccggaatatcatgagttcgatcgcgcctcgcaggatgcattctggcgttcgccctggcagcttagctcgcaaagtaaccgcatgggctatcgcttacaggggcaaattttaaaacgcaccaccgatcgcgaactgttatctcacggtttgttaccgggcgtggtgcaggtgccacataacgggcagccgattgtgttgatgaacgacgcacagaccaccggtggttacccgcgtattgcctgtatcattgaggctgatatgtaccatctggcgcaaattccgctcggtcagccgattcattttgtccagtgttcactggaagaggcactaaaagcacggcaagatcagcaacgttattttgaacaattagcgtggcggctgcacaatgaaaattgacctgaacgccgatctgggcgaaggctgcgccagcgacgcagagctattaacgctggtttcctctgccaatattgcctgtggatttcatgcaggcgatgcgcaaatcatgcaggcttgcgtgcgtgaagcaataaaaaatggtgtcgcgattggcgctcacccgagttttcccgacagggaaaattttggtcgcagcgccatgcagctgccgccagaaaccgtttacgcccagacgctgtatcaaattggcgcgctggcaacgattgcccgtgcgcaaggcggcgtaatgcgtcatgtcaaaccgcacggcatgttgtacaaccaggcggcgaaagaagcacaactggcagacgccatcgccagagcggtatacgcttgcgatccagcattgattctcgtcgggctggcgggaagcgagctgattcgtgcaggcaagcaatatggtctgacaacgcgcgaggaagtgtttgccgatcgcggttatcaggctgacggctcgctggtgccgcgaagccagtcaggcgcgttgattgaaaacgaagaacaggcgctggcgcaaacgctggagatggtgcaacacggcagagtcaaaagtatcaccggcgaatgggcaacggtcgcggcgcaaacggtctgcctgcatggcgacggcgagcacgcactggcgttcgcccgccgactacgctctgcatttgccgaaaaggggattgttgtcgcagcataaccccgattaataaagaatgaaaaaaggatatcaccatgcctgaaggcccggagatccgccgtgcagcggataacctggaggcggcgatcaaaggcaaaccactaactgatgtctggtttgccttcccgcagttaaaaccttatcaatcacaacttatcggtcaacacgttacccatgtggaaacgcgtggtaaggcgttgttaactcatttttccaacgacttaacgctctacagccataatcagctttacggcgtctggcgcgtggttgataccggcgaagagccgcagaccacgcgagtattgcgggtaaaactgcaaacggctgacaaaaccattctgctttatagcgcctcggatattgagatgttgaccccggaacaactgaccacgcatccgtttttacaacgcgttggtcccgatgtgctggatccgaatctgacgccggaggtggtgaaagaacgattattgtcgccgcgctttcgtaaccgtcagtttgctggattactgctcgatcaggcgtttctggctgggcttggcaattatttgcgggtggagatcctctggcaggttgggttgactggaaatcataaagcgaaagatctcaatgcggcgcaactggatgcactcgcacacgcgttactggagattcctcgattttcctacgctacgcgggggcaggtggatgagaataagcatcatggggcgctgtttcgctttaaggtttttcatcgagatggcgaaccgtgcgaacgttgtggcagcatcattgagaaaaccacgctgtcatctcgcccgttttactggtgccctggctgccagcactaggccgaccgcttcggcgcataggttgaaataaaccgcgcaatggcaggccctgtcagcaaaatactgaacaggcgtagggtttgcatcgccataatgagcgccatatcggcattgctccctgcggcgatgaccgccacggtatcaagcccgccggggctggtggcgaggtaggcagtcataaaatcaatgtgcataaaccgggtcagcccccacgccatacccgcacaaatagccagcagagcaaaaatcgacagcaggatttgcggtagcgggcgtagtgcccgcagtaagatttgtttatcgaaaccaagaccaatccgccagccaattgccatatacgccatcgccagcagccattccggtagttcgatggtgatgagctgaccagactggagcactgcgcccgccagcatcgggatgagcatcgtgccggaaggaagacgcagcaggcatcccactgtaccggcaacgaccgcgagcaaaatagtaagcaggagattaatgctcactggcgggaaccagacgatatgctggttaaccgcttcagcgttatcgcccagcatcatgcgggtgaccagaacagcggcccccgcgacgaacagcactcgcagatattgcataaacgccaccaggcgaatatctgcgccgtaatcttgcgccatagcgaccattgccgccgcgccgccaggagaggagccccaggcaccggtatttccaggcaatgagctatagcgcaccaataaccaacccacaatggcgctggaaagcagcgttaccagtaaaattgcaagcacgatcggccagttgacggccagggtggtgagaatcgaaccagtgaggttttgcgcaatcatgcagccaagaatggcctgggcggcgagaaaagcagagcggggaagttgcagagtaattccgcgcatactaaagatgatcccggcgatcatcggcccaagtaatagcgccgccgggagatgtaccgcgaggaaaccaatagaaaggagaagtgatagcacacataacattccccactgcaaaactggcatccttcgctccctcattattttctctttggtgtatcgatacagcataaagaaagctgggccaggaaaaaataacagcaatcaaggaaaaggggaaaatcagcaattttctgaaagagatgccctttccggcggcaaagggcatcatggtaaatcagttatagttaatcttaaaaagcaccactgtatcgaaggggccagcctcgatgggggtgcctggaatggacgaaagttcagccgtataggttttttcgtagaccaacatgtcactggtgaaatcggcgtattcagcatatttattgaaggtataaggcgaggcgttttcatccagtaaacgtagcttcagaccattaccaatcaacaatgctttatcttcttcaaccaacgtttcttcggtataaaaggaggaactgactttaaatccgtcggtgcattgatcgttttggctcttggtcgttttaatactgaacgttttcgacattgtgtggcgacgtatatccagcaaattaaatttaccaaaatcaatcacctgtgtttccggtgaaatggaaaaattgacgctgcaatccagcacgcgaatgttttccagaccagtaatatgatatttcaggttttgggcagtagggtcttcgttaacgctaccggcaccgtcaaattgcacgacgatatagtcgctaagcgtactttgataatcatgcggcggcatttctcgtattttgacgtataaccgcatgcgagcgagaaaggtacgcgacatatgaatattagcgggatcgcccgagcaaattttgttctgccatcccatcgcgatgatctgctcaggggtataaatatcaatgttcttactgtcgatacactggttagtgtcgatgcgactttttcccagactggcatcgtaatcgacaccgttgtatgtcacgccgagttgataataacgatcctgcacccccggataggggtttacccaggcgtagacatgctcgctttcaaagttgccgttggtattgttgtcacaatagacgggaattttaatatcgtcagattcccagatcttatcaccgggtttggcattgcctggtacagcaaacggttgaatcgcttctgatttttctactgcgccaccagatgtaccaaaatagcagttcagcgccattgcagacttcaacggcagaaataacaggcagatgacgagcaacaatcccttgccagcactcatttcgcctccactgcttgtaaacggcattgtccgctgcagttgagcgtcgtcatgcgtaatgcgccgtaatcatccatgtaaccgagataaaactggctgccgctataacttccggtgtttgtgttgaccgtactaaaaggtgcaaccatcacggttttgaagcctgggagaacgcctttttcatttctccccagataggcaatggtcagataatacgcggtaggatttttcagtgtcagttggttgccctgctggctgacctgtaactgcagttcgaccttttctcctgctttcttgcgtaatgcagccggtcgccagaacaatttaatacgactttgaatagcgacctgaagtatcgcatggtcgctgcttttatccggagcgggaggaatttcgcgcatattgtagaaaaatagcgtttcgcgatcgccaggtaattgtgtggttgaggcttgtttcacaacccgcacctgcgatgtcgctttcggttccagacgttgaatagggggcaaagcgaccagaagagcatcgcttttctcccctttttcattttctatccaggaataagcaagataaggcagtttgtcactttggttttcgatacgcaggctggtggctttgtcattggcgttaaacacaatgcgtgtgcgatcgggttgcaccgcagcattgcaacccaagctgatggttaacaacattaagggtaatcctttaataaatgtcattctcttttccttaattaatgacaaggtaaaatcaggcgtttggtcgtgtcttccagacgttctggcagatgaataatgcagctttgctcaccccagaccacggtaaacagttgattttcagcgacaccgcttaaccaggcatgtccttcctcgccaaccatacccacgctaatgccgctgtcatcctggcggatatccgcaccgaggggagggaactgaccgctggcgttgcgtatgatgacgttaacgtctttaccggaacgggaagccagtgatttgtaacctatcgcgccttcaatccatgtttccttgatgacgttttctgcaactgttacgccgtcgggtaagtcattcatgttcaccgccacggtggaaggctggtaactggaaatcaacggcaccaccgcaatgccaaaatggttggtgtagtcgagattgccctgaaccggaatatctgccacgccatcggtgctgaccatcaggcgtggttcattggtggagctgcggcgatgaaatgctgcaccatattgggttgcggtgaaagaaccgctccagctgctgctgacggaactgtaatcactggcggcataggtaccagaaatatcccactcacccgctgaactcaggtgctgatagttaccgctcacctgggctccattgtccggacgatcggattgcagtccggcagacatgccccagctattacgttcatccagcgtatcgttccacgacatgcggtgtatggtgctgtggctactgttttgcatgtcatagccaacccgaccaccgttaccgaaggggagcgaaatcgacagataaatctggttgtcgcgatctttatcttcgtagtgggtcgtattgaatgacgtcgaaatcgagatatctctccagtcaccaatatcaacattaaaacctgctgtgatgttggcggtcgtggaggcgtctgcattccaccaggtttgatgtagcaggttggcgtaaagattgaggtttagtggggtaatcggttggcccacggataagctgatcgtctgtttttcgtcctgcgcatcgctgtcgttgtatttgtgatccagatagttggcgtagctgtgaaaatgacgatctgagaagcgataagcggcgagcgaaatcgtgctgttggtggcatccacttgtttgctgtaattaaaacggtagcttaagccccgctcgtcctgctgagtatcaaaatggctactggcccaggtgacatcaaaggacagtgcgccaagccacagcatattttgcccgatacccattgcggcagaatggtagtcatcatcagaaatcagcaggccgccgtacagcgaggtgtttgagagcatcccccaggaaacttcattgctaaaaaaggtttcattttcagtttgatgtgacatggaaggccgtggctgacccgcggccaatttatagcgaacctgtccctggcgagtcaggaagggcgtcgatgctgccgaaacctggaaattgttcacccgaccatcttcttccgtcactttgacatccagcgtgccctgaacagactgattgaggtcatcaataataaacgggcctggcgggacttttttctggtaaatgacgcggcctgattgactgatcgtcaccgtggcattggtctgtgcaataccgctaatttgtggggcgtagccacgcagctcccacggtaacattcgatcgtcactcgccagtgccgcgccggtataagaaaaaccatcgaaaatattggaactgaaatcggtttcgccgagggttaacttagagcctaattgcggtaatggacgaaaaagataggtgcgcgatattccgcctgactggtcatggttatcttcgctatcggtcttattaagctggtaatcactgcgtaagcgccatgccccggcgttaattccggcggtaccgtaggcattcaggttagtgctgctgctgccgtcctgtgggcggtagctgctggcaaacaagttgtaatccatcaggacaccggcaacaccttctttccatgtagaggggggagcccagttttctgagtgccacgccagccaggcttgcggaatactaatattcagttgctgattggcttgatcgaaattgaagagcatttcaggtcgggaactgaaatcaatacaccgatctatctgtggcaaggactgacggatatctggttttaaaccaaatttatcgaccagtgaatcattgatgcatggaatggttttgtcaccctttttttgccagttaattttttgcccattactgattttgttgttattcaccgcaacgctaacaaaatattcaccgggagcaatgactcctttttcctttaataatgaaatatcaatgcggtcgcgcattgatttatcgagaacattcagattgaattcgaccgccattgcgcaaggcatcgccatgaccaggcaggatacaaaagagagtcgataaatattcacggtgtccatacctgataaatattttatgaaaggcggcgatgatgccgccaaaataatacttatttataatccagcacgtaggttgcgttagcggttacttcacctgccgtgacatcgactgcattatcaatttgttccatccaggcgaaaaagttcagcgtctgttctgatgagcttgcatccaggtcaagatctggcgcggctgaacctaatacgatgttaccgtcatttttgtccatcagtcgtacaccgaccccagttgcttcgcctgcactggtgttgctcaacaaaggcgtagcaccagttgtcttagccgtgctatcgaaggttacgccaactttggataccggcattccgctaccgttgtcagaagcaggcagatcacagttgatcaagcgaatgtcgacggccactttattgctatgatgctcccggtttatatgggttgtcgtgacttgtccaagatctatgtttttatcaatatcttctggatgaatttcacaaggtgcttcaataacctcccccttaaagtgaatttcgccagaaccttcatcagcagcataaacaggtgcagtgaacagcagagatacggccagtgcggccaatgttttttgtcctttaaacataacagagtcctttaaggatatagaataggggtatagctacgccagaatatcgtatttgattattgctagtttttagttttgcttaaaaatattgttagttttattaaatgcaaaactaaattattggtatcatgaatttgttgtatgatgaataaaatataggggggtatagatagacgtcattttcatagggttataaatgcgactaccatgaagtttttaattgaaagtattgggttgctgataatttgagctgttctattctttttaaatatctatataggtctgttaatggattttatttttacaattttttgtgtttaggcatataaaaatcaacccgccatatgaacggcgggttaaaatatttacaacttagcaatcaaccattaacgcttgatatcgcttttaaagtcgcgtttttcatatcctgtatacagctgacgcggacgggcaatcttcataccgtcactgtgcatttcgctccagtgggcgatccagccaacggtacgtgccattgcgaaaatgacggtgaacatggaagacggaatacccatcgctttcaggatgataccagagtagaaatcgacgttcgggtacagtttcttctcgataaagtacgggtcgttcagcgcgatgttttccagctccatagccacttccagcaggtcatccttcgtgcccagctctttcagcacttcatggcaggtttcacgcattacggtggcgcgcgggtcgtaatttttgtacacgcggtgaccgaagcccatcaggcggaaagaatcatttttgtctttcgcacgacgaacaaattccggaatgtgtttaacggagctgatttcttccagcattttcagcgccgcttcgttagcaccgccgtgcgcaggtccccacagtgaagcaatacctgctgcgatacaggcaaacgggttcgcacccgaagagccagcggtacgcacggtggaggtagaggcgttctgttcatggtcagcgtgcaggatcagaatacggtccatagcacgttccagaatcggattaacttcatacggttcgcacggcgtggagaacatcatattcaggaagttaccggcgtaggagagatcgttgcgcgggtaaacaaatggctgaccaatggaatacttgtaacacatcgcggccatggtcggcattttcgacagcaggcggaacgcggcaatttcacggtgacgaggattgttaacatccagcgagtcgtgatagaacgccgccagcgcgccggtaataccacacatgactgccattggatgcgagtcgcgacggaaagcatggaacagacgggtaatctgctcgtggatcatggtatgacgggtcaccgtagttttaaattcgtcatactgttcctgagtcggtttttcaccattcagcaggatgtaacaaacttccaggtagttagaatcggtcgccagctgatcgatcgggaaaccgcggtgcagcaaaataccttcatcaccatcaataaaagtaattttagattcgcaggatgcggttgaagtgaagcctgggtcaaaggtgaacacaccttttgaaccgagagtacggatatcaataacatcttgacccagcgtgcctttcagcacatccagttcaacagctgtatccccgttgagggtgagttttgcttttgtatcagccatttaaggtctccttagcgccttattgcgtaagactgccggaacttaaatttgccttcgcacatcaacctggctttacccgttttttatttggctcgccgctctgtgaaagaggggaaaacctgggtacagagctctgggcgcttgcaggtaaaggatccattgatgacgaataaatggcgaatcaagtacttagcaatccgaattattaaacttgtctaccactaataactgtcccgaatgaattggtcaatacttccacactgttacataagttaatcttaggtgaaataccgacttcataacttttacgcattatatgcttttcctggtaatgtttgtaacaactttgttgaatgattgtcaaattagatgattaaaaattaaataaatgttgttatcgtgacctggatcactgttcaggataaaacccgacaaactatatgtaggttaattgtaatgattttgtgaacagcctatactgccgccaggtctccggaacaccctgcaatcccgagccacccagcgttgtaacgtgtcgttttcgcatctggaagcagtgttttgcatgacgcgcagttatagaaaggacgctgtctgacccgcaagcagaccggaggaaggaaatcccgacgtctccaggtaacagaaagttaacctctgtgcccgtagtccccagggaataataagaacagcatgtgggcgttattcatgataagaaatgtgaaaaaacaaagacctgttaatctggacctacagaccatccggttccccatcacggcgatagcgtccattctccatcgcgtttccggtgtgatcacctttgttgcagtgggcatcctgctgtggcttctgggtaccagcctctcttcccctgaaggtttcgagcaagcttccgcgattatgggcagcttcttcgtcaaatttatcatgtggggcatccttaccgctctggcgtatcacgtcgtcgtaggtattcgccacatgatgatggattttggctatctggaagaaacattcgaagcgggtaaacgctccgccaaaatctcctttgttattactgtcgtgctttcacttctcgcaggagtcctcgtatggtaagcaacgcctccgcattaggacgcaatggcgtacatgatttcatcctcgttcgcgctaccgctatcgtcctgacgctctacatcatttatatggtcggttttttcgctaccagtggcgagctgacatatgaagtctggatcggtttcttcgcctctgcgttcaccaaagtgttcaccctgctggcgctgttttctatcttgatccatgcctggatcggcatgtggcaggtgttgaccgactacgttaaaccgctggctttgcgcctgatgctgcaactggtgattgtcgttgcactggtggtttacgtgatttatggattcgttgtggtgtggggtgtgtgatgaaattgccagtcagagaatttgatgcagttgtgattggtgccggtggcgcaggtatgcgcgcggcgctgcaaatttcccagagcggccagacctgtgcgctgctctctaaagtcttcccgacccgttcccataccgtttctgcgcaaggcggcattaccgttgcgctgggtaatacccatgaagataactgggaatggcatatgtacgacaccgtgaaagggtcggactatatcggtgaccaggacgcgattgaatatatgtgtaaaaccgggccggaagcgattctggaactcgaacacatgggcctgccgttctcgcgtctcgatgatggtcgtatctatcaacgtccgtttggcggtcagtcgaaaaacttcggcggcgagcaggcggcacgcactgcggcagcagctgaccgtaccggtcacgcactgttgcacacgctttatcagcagaacctgaaaaaccacaccaccattttctccgagtggtatgcgctggatctggtgaaaaaccaggatggcgcggtggtgggttgtaccgcactgtgcatcgaaaccggtgaagtggtttatttcaaagcccgcgctaccgtgctggcgactggcggagcagggcgtatttatcagtccaccaccaacgcccacattaacaccggcgacggtgtcggcatggctatccgtgccggcgtaccggtgcaggatatggaaatgtggcagttccacccgaccggcattgccggtgcgggcgtactggtcaccgaaggttgccgtggtgaaggcggttatctgctgaacaaacatggcgaacgttttatggagcgttatgcgccgaacgccaaagacctggcgggccgtgacgtggttgcgcgttccatcatgatcgaaatccgtgaaggtcgcggctgtgatggtccgtgggggccacacgcgaaactgaaactcgatcacctgggtaaagaagttctcgaatcccgtctgccgggtatcctggagctttcccgtaccttcgctcacgtcgatccggtgaaagagccgattccggttatcccaacctgtcactacatgatgggcggtattccgaccaaagttaccggtcaggcactgactgtgaatgagaaaggcgaagatgtggttgttccgggactgtttgccgttggtgaaatcgcttgtgtatcggtacacggcgctaaccgtctgggcggcaactcgctgctggacctggtggtctttggtcgcgcggcaggtctgcatctgcaagagtctatcgccgagcagggcgcactgcgcgatgccagcgagtctgatgttgaagcgtctctggatcgcctgaaccgctggaacaataatcgtaacggtgaagatccggtggcgatccgtaaagcgctgcaagaatgtatgcagcataacttctcggtcttccgtgaaggtgatgcgatggcgaaagggcttgagcagttgaaagtgatccgcgagcgtctgaaaaatgcccgtctggatgacacttccagcgagttcaacacccagcgcgttgagtgcctggaactggataacctgatggaaacggcgtatgcaacggctgtttctgccaacttccgtaccgaaagccgtggcgcgcatagccgcttcgacttcccggatcgtgatgatgaaaactggctgtgccactccctgtatctgccagagtcggaatccatgacgcgccgaagcgtcaacatggaaccgaaactgcgcccggcattcccgccgaagattcgtacttactaatgcggagacaggaaaatgagactcgagttttcaatttatcgctataacccggatgttgatgatgctccgcgtatgcaggattacaccctggaagcggatgaaggtcgcgacatgatgctgctggatgcgcttatccagctaaaagagaaagatcccagcctgtcgttccgccgctcctgccgtgaaggtgtgtgcggttccgacggtctgaacatgaacggcaagaatggtctggcctgtattaccccgatttcggcactcaaccagccgggcaagaagattgtgattcgcccgctgccaggtttaccggtgatccgcgatttggtggtagacatgggacaattctatgcgcaatatgagaaaattaagccttacctgttgaataatggacaaaatccgccagctcgcgagcatttacagatgccagagcagcgcgaaaaactcgacgggctgtatgaatgtattctctgcgcatgttgttcaacctcttgtccgtctttctggtggaatcccgataagtttatcggcccggcaggcttgttagcggcatatcgtttcctgattgatagccgtgataccgagactgacagccgcctcgacggtttgagtgatgcattcagcgtattccgctgtcacagcatcatgaactgcgtcagtgtatgtccgaaggggctgaacccgacgcgcgccatcggccatatcaagtcgatgttgttgcaacgtaatgcgtaaaccgtaggcctgataagacgcgcaagcgtcgcatcaggcaaccagtgccggatgcggcgtgaacgccttatccggcctacaagtcattacccgtaggcctgataagcgcagcgcatcaggcgtaacaaagaaatgcaggaaatctttaaaaactgcccctgacactaagacagtttttaaaggttccttcgcgagccactacgtagacaagagctcgcaagtgaaccccggcacgcacatcactgtgcgtggtagtatccacggcgaagtaagcataaaaaagatgcttaagggatcacgatgcagaacagcgctttgaaagcctggttggactcttcttacctctctggcgcaaaccagagctggatagaacagctctatgaagacttcttaaccgatcctgactcggttgacgctaactggcgttcgacgttccagcagttacctggtacgggagtcaaaccggatcaattccactctcaaacgcgtgaatatttccgccgcctggcgaaagacgcttcacgttactcttcaacgatctccgaccctgacaccaatgtgaagcaggttaaagtcctgcagctcattaacgcataccgcttccgtggtcaccagcatgcgaatctcgatccgctgggactgtggcagcaagataaagtggccgatctggatccgtctttccacgatctgaccgaagcagacttccaggagaccttcaacgtcggttcatttgccagcggcaaagaaaccatgaaactcggcgagctgctggaagccctcaagcaaacctactgcggcccgattggtgccgagtatatgcacattaccagcaccgaagaaaaacgctggatccaacagcgtatcgagtctggtcgcgcgactttcaatagcgaagagaaaaaacgcttcttaagcgaactgaccgccgctgaaggtcttgaacgttacctcggcgcaaaattccctggcgcaaaacgcttctcgctggaaggcggtgacgcgttaatcccgatgcttaaagagatgatccgccacgctggcaacagcggcacccgcgaagtggttctcgggatggcgcaccgtggtcgtctgaacgtgctggtgaacgtgctgggtaaaaaaccgcaagacttgttcgacgagttcgccggtaaacataaagaacacctcggcacgggtgacgtgaaataccacatgggcttctcgtctgacttccagaccgatggcggcctggtgcacctggcgctggcgtttaacccgtctcaccttgagattgtaagcccggtagttatcggttctgttcgtgcccgtctggacagacttgatgagccgagcagcaacaaagtgctgccaatcaccatccacggtgacgccgcagtgaccgggcagggcgtggttcaggaaaccctgaacatgtcgaaagcgcgtggttatgaagttggcggtacggtacgtatcgttatcaacaaccaggttggtttcaccacctctaatccgctggatgcccgttctacgccgtactgtactgatatcggtaagatggttcaggccccgattttccacgttaacgcggacgatccggaagccgttgcctttgtgacccgtctggcgctcgatttccgtaacacctttaaacgtgatgtcttcatcgacctggtgtgctaccgccgtcacggccacaacgaagccgacgagccgagcgcaacccagccgctgatgtatcagaaaatcaaaaaacatccgacaccgcgcaaaatctacgctgacaagctggagcaggaaaaagtggcgacgctggaagatgccaccgagatggttaacctgtaccgcgatgcgctggatgctggcgattgcgtagtggcagagtggcgtccgatgaacatgcactctttcacctggtcgccgtacctcaaccacgaatgggacgaagagtacccgaacaaagttgagatgaagcgcctgcaggagctggcgaaacgcatcagcacggtgccggaagcagttgaaatgcagtctcgcgttgccaagatttatggcgatcgccaggcgatggctgccggtgagaaactgttcgactggggcggtgcggaaaacctcgcttacgccacgctggttgatgaaggcattccggttcgcctgtcgggtgaagactccggtcgcggtaccttcttccaccgccacgcggtgatccacaaccagtctaacggttccacttacacgccgctgcaacatatccataacgggcagggcgcgttccgtgtctgggactccgtactgtctgaagaagcagtgctggcgtttgaatatggttatgccaccgcagaaccacgcactctgaccatctgggaagcgcagttcggtgacttcgccaacggtgcgcaggtggttatcgaccagttcatctcctctggcgaacagaaatggggccggatgtgtggtctggtgatgttgctgccgcacggttacgaagggcaggggccggagcactcctccgcgcgtctggaacgttatctgcaactttgtgctgagcaaaacatgcaggtttgcgtaccgtctaccccggcacaggtttaccacatgctgcgtcgtcaggcgctgcgcgggatgcgtcgtccgctggtcgtgatgtcgccgaaatccctgctgcgtcatccgctggcggtttccagcctcgaagaactggcgaacggcaccttcctgccagccatcggtgaaatcgacgagcttgatccgaagggcgtgaagcgcgtagtgatgtgttctggtaaggtttattacgacctgctggaacagcgtcgtaagaacaatcaacacgatgtcgccattgtgcgtatcgagcaactctacccgttcccgcataaagcgatgcaggaagtgttgcagcagtttgctcacgtcaaggattttgtctggtgccaggaagagccgctcaaccagggcgcatggtactgcagccagcatcatttccgtgaagtgattccgtttggggcttctctgcgttatgcaggccgcccggcctccgcctctccggcggtagggtatatgtccgttcaccagaaacagcaacaagatctggttaatgacgcgctgaacgtcgaataaataaaggatacacaatgagtagcgtagatattctggtccctgacctgcctgaatccgtagccgatgccaccgtcgcaacctggcataaaaaacccggcgacgcagtcgtacgtgatgaagtgctggtagaaatcgaaactgacaaagtggtactggaagtaccggcatcagcagacggcattctggatgcggttctggaagatgaaggtacaacggtaacgtctcgtcagatccttggtcgcctgcgtgaaggcaacagcgccggtaaagaaaccagcgccaaatctgaagagaaagcgtccactccggcgcaacgccagcaggcgtctctggaagagcaaaacaacgatgcgttaagcccggcgatccgtcgcctgctggctgaacacaatctcgacgccagcgccattaaaggcaccggtgtgggtggtcgtctgactcgtgaagatgtggaaaaacatctggcgaaagccccggcgaaagagtctgctccggcagcggctgctccggcggcgcaaccggctctggctgcacgtagtgaaaaacgtgtcccgatgactcgcctgcgtaagcgtgtggcagagcgtctgctggaagcgaaaaactccaccgccatgctgaccacgttcaacgaagtcaacatgaagccgattatggatctgcgtaagcagtacggtgaagcgtttgaaaaacgccacggcatccgtctgggctttatgtccttctacgtgaaagcggtggttgaagccctgaaacgttacccggaagtgaacgcttctatcgacggcgatgacgtggtttaccacaactatttcgacgtcagcatggcggtttctacgccgcgcggcctggtgacgccggttctgcgtgatgtcgataccctcggcatggcagacatcgagaagaaaatcaaagagctggcagtcaaaggccgtgacggcaagctgaccgttgaagatctgaccggtggtaacttcaccatcaccaacggtggtgtgttcggttccctgatgtctacgccgatcatcaacccgccgcagagcgcaattctgggtatgcacgctatcaaagatcgtccgatggcggtgaatggtcaggttgagatcctgccgatgatgtacctggcgctgtcctacgatcaccgtctgatcgatggtcgcgaatccgtgggcttcctggtaacgatcaaagagttgctggaagatccgacgcgtctgctgctggacgtgtagtagtttaagtttcacctgcactgtagaccggataaggcattatcgccttctccggcaattgaagcctgatgcgacgctgacgcgtcttatcaggcctacgggaccaccaatgtaggtcggataaggcgcaagcgccgcatccgacaagcgatgcctgatgtgacgtttaacgtgtcttatcaggcctacgggtgaccgacaatgcccggaagcgatacgaaatattcggtctacggtttaaaagataacgattactgaaggatggacagaacacatgaacttacatgaatatcaggcaaaacaactttttgcccgctatggcttaccagcaccggtgggttatgcctgtactactccgcgcgaagcagaagaagccgcttcaaaaatcggtgccggtccgtgggtagtgaaatgtcaggttcacgctggtggccgcggtaaagcgggcggtgtgaaagttgtaaacagcaaagaagacatccgtgcttttgcagaaaactggctgggcaagcgtctggtaacgtatcaaacagatgccaatggccaaccggttaaccagattctggttgaagcagcgaccgatatcgctaaagagctgtatctcggtgccgttgttgaccgtagttcccgtcgtgtggtctttatggcctccaccgaaggcggcgtggaaatcgaaaaagtggcggaagaaactccgcacctgatccataaagttgcgcttgatccgctgactggcccgatgccgtatcagggacgcgagctggcgttcaaactgggtctggaaggtaaactggttcagcagttcaccaaaatcttcatgggcctggcgaccattttcctggagcgcgacctggcgttgatcgaaatcaacccgctggtcatcaccaaacagggcgatctgatttgcctcgacggcaaactgggcgctgacggcaacgcactgttccgccagcctgatctgcgcgaaatgcgtgaccagtcgcaggaagatccgcgtgaagcacaggctgcacagtgggaactgaactacgttgcgctggacggtaacatcggttgtatggttaacggcgcaggtctggcgatgggtacgatggacatcgttaaactgcacggcggcgaaccggctaacttccttgacgttggcggcggcgcaaccaaagaacgtgtaaccgaagcgttcaaaatcatcctctctgacgacaaagtgaaagccgttctggttaacatcttcggcggtatcgttcgttgcgacctgatcgctgacggtatcatcggcgcggtagcagaagtgggtgttaacgtaccggtcgtggtacgtctggaaggtaacaacgccgaactcggcgcgaagaaactggctgacagcggcctgaatattattgcagcaaaaggtctgacggatgcagctcagcaggttgttgccgcagtggaggggaaataatgtccattttaatcgataaaaacaccaaggttatctgccagggctttaccggtagccaggggactttccactcagaacaggccattgcatacggcactaaaatggttggcggcgtaaccccaggtaaaggcggcaccacccacctcggcctgccggtgttcaacaccgtgcgtgaagccgttgctgccactggcgctaccgcttctgttatctacgtaccagcaccgttctgcaaagactccattctggaagccatcgacgcaggcatcaaactgattatcaccatcactgaaggcatcccgacgctggatatgctgaccgtgaaagtgaagctggatgaagcaggcgttcgtatgatcggcccgaactgcccaggcgttatcactccgggtgaatgcaaaatcggtatccagcctggtcacattcacaaaccgggtaaagtgggtatcgtttcccgttccggtacactgacctatgaagcggttaaacagaccacggattacggtttcggtcagtcgacctgtgtcggtatcggcggtgacccgatcccgggctctaactttatcgacattctcgaaatgttcgaaaaagatccgcagaccgaagcgatcgtgatgatcggtgagatcggcggtagcgctgaagaagaagcagctgcgtacatcaaagagcacgttaccaagccagttgtgggttacatcgctggtgtgactgcgccgaaaggcaaacgtatgggccacgcgggtgccatcattgccggtgggaaagggactgcggatgagaaattcgctgctctggaagccgcaggcgtgaaaaccgttcgcagcctggcggatatcggtgaagcactgaaaactgttctgaaataaatatctgtaataagaaatagccctcgccgcttccctctacaggaatggcgaagggctgtcggtttcgacatggttggccatcgtatgatggccttttttgtgcttatcgcgatgattttcgctgcgctatcagggtaaatttatagtcatcggtattaaaagcgttgcggctatattcaaacacccgaccatcaactaaatatccacgcgatactttttcaagaatcggctttgtctggctgatattaagcagacggctcatctcttcggttggcatcagaggaatgatttcctgttcgctacgatcgataaccattttcttcacttcttcgataaagtgatatttcgaattttccatgacctgccaggtgagatccgggaacaacgcaagcggcatccaggtttcttccagcgccattggcttttgcttgcgatagcgcacgcgcttcacatgccacacacgatcctgcggggtgatttgtagctgttgctgaagaaaatcgtcagccggaatcacttcgaatatcagaacttcactgtgtgtatcgacgtgacggtccgacagtttttcatcaaaactggttaactgaaaaatatcgtaattgacccgctcttctttgacgtaagtcccgctgccctgaatgctttcgaggatctgctgctcgactagctggcgcaaagcctgacgcaccgtaacccggctgacgccaaactctgtttgtagcgctgattcagtgggtaacgcatcgccaggtttaagctcgccacgcgcaatttgttcacgaatgcgatcggcaatctgccggtataagggcttgtgtcccatttttagtatctcattaatacgaatttaaccattatgcccgataaattcatcctgtaaataatacaaatacaatacaaataatttcaatcaagtgaaattgatcacataatggtattgttttatcgggcacactggcgcgactataaaaacgatcaagtgaggatcatgatgaatctgacgactctgacccaccgcgatgcgttgtgtctgaatgcgcgctttaccagccgtgaagaggccatccacgcgttgactcaacgtcttgctgctctggggaaaatttccagtactgagcaatttctggaagaagtgtatcgccgtgaaagccttggcccgaccgccttaggtgaagggttggctgtgccgcatggcaaaactgctgcggtaaaagaagcggcgtttgcggtcgccacactcagcgagccgcttcagtgggaaggcgttgatggcccggaagcagttgatttagtggtgctgctggcgattccccccaatgaagcgggtactacgcatatgcaactgctgacagcgctgaccacgcgccttgcggatgatgagattcgggcgcgtatacagtcggcgacgacgcctgatgagttgctctcggcgctggatgacaagggaggcacgcaaccttctgcctctttttccaacgcgccaactatcgtctgcgtaacggcctgtccggcgggtattgctcacacctatatggctgcggaatatctggaaaaagccggacgcaaactcggcgtaaatgtttacgttgaaaaacaaggcgctaacggcattgaagggcgtttaacggcggatcaactcaatagtgcaaccgcctgtatttttgcggctgaagtcgccatcaaggagagtgagcgttttaatggcattcccgcgctttcagtgcctgttgccgagccgattcgccatgcagaagcgttgatccaacaagcgcttaccctcaagcgtagcgatgagacgcgtaccgtacagcaagatacgcaaccggtgaaaagtgtcaaaacggagctgaaacaggcactgttgagcggaatctcttttgccgtaccgttgattgtcgcggggggcacggtgctggcggtcgcggtattactgtcgcaaatcttcgggctacaagatctgtttaatgaagaaaactcctggctgtggatgtaccgcaagctgggcggcgggctgctcggaattttgatggtaccggtgctcgcggcctataccgcctattctctggcagataaaccggcgttagcgccaggctttgcggctggacttgccgccaacatgatcggctccgggtttctcggcgcggtcgttggcggattgatagccggttacttgatgcgctgggtgaaaaatcacttgcgtcttagcagtaaattcaatggattcctgactttttatctctacccggtgctcggtacgttgggagcgggcagtctgatgctgtttgtggtgggggaacctgtcgcctggatcaataactcgcttaccgcctggctgaacggtctgtcaggaagtaacgcgctgttgctgggtgccattctcggttttatgtgttcctttgaccttggagggccagtgaataaagccgcttatgcattctgcctgggcgcaatggcgaacggcgtttacggcccgtatgccattttcgcctccgtcaaaatggtttcggcatttaccgtaaccgcttccacgatgctcgcaccgcgcctgtttaaagagtttgaaattgagaccgggaaatccacctggctgttagggctggcaggtattaccgaaggggcgatcccgatggcgattgaagatccgctgcgggttattggttcgtttgtgctgggctctatggtaacgggcgctattgtcggtgcgatgaatatcggcctttcgacacccggtgccggcattttctcgctctttttacttcatgataatggcgcgggcggtgttatggcggcaattggctggtttggcgcggcattggtgggggctgcaatctcgactgcaattctcctgatgtggcggcgtcacgcggttaagcatggcaactatctgactgatggcgtaatgccataaacaaaaaggaaacgacgatgaaagcagtatctcgcgttcacatcaccccgcatatgcactgggatcgagagtggtatttcaccaccgaagagtcacgtattctgctggtcaataatatggaagagatcctgtgccgactggaacaggacaacgaatacaaatattacgtactcgacgggcaaacggcgatcctcgaagattatttcgcggtgaaaccggaaaacaaagaccgtgtgaagaaacaggtagaagccggcaagttgattatcggcccctggtatacccagaccgataccacgattgtttctgcggaatccatcgtccgtaatctgatgtacggaatgcgtgactgcctcgcgtttggcgagccgatgaaaataggttatttaccagattcctttggcatgtccgggcaactgccgcatatctacaatggatttggcattacccgcaccatgttctggcgcggatgttcggagcgccacggtactgataaaaccgagtttttgtggcaaagcagtgacggtagcgaagtgacggcgcaggtgctgccgctgggctacgccatcggtaagtacttacctgccgacgaaaacggattacgtaaacgcctcgacagttattttgacgtgctggaaaaagcgtctgtaaccaaagagattttgctgccgaatgggcatgaccagatgccattgcagcaaaatatcttcgaagtgatggataagctacgtgagatctaccctcaacgtaagtttgtgatgagccgctttgaagaggtatttgagaagatcgaagcgcagcgagataatctggcaaccctgaaaggggaatttattgatggcaaatatatgcgcgtgcatcgcaccatcggttctacgcgtatggatatcaaaattgcccacgcgcgtattgaaaataagattgttaatctgctggaaccgctggcaacactggcctggacgttgggttttgaataccaccacggcttgctggagaaaatgtggaaagagatcttaaaaaatcatgcccacgacagtatcggctgctgctgtagtgacaaagttcatcgcgaaatcgtcgcccgcttcgaactggctgaagacatggcggataatctgattcgtttctacatgcgcaaaattgccgacaacatgccgcagagcgacgccgacaaactcgtcctgtttaacctgatgccctggccgcgtgaagaagttatcaacaccactgtgcggctgcgcgccagccagtttaatttgcgggacgatcgcggtcagcctgtaccgtattttattcgccatgcccgtgagatcgatccaggcctaatcgatcggcaaatagttcattacggtaattacgatccctttatggagtttgatatacagatcaaccagattgtcccttctatgggctatcgcacgctttatatcgaagcgaatcagcctggcaacgtaattgcggcaaaaagtgacgctgaagggatactggaaaatgctttctggcaaattgcgctcaatgaggatggttctctgcaactggtagataaagacagcggtgtgcgctatgaccgggtattgcaaattgaagaaagctctgatgatggtgatgaatatgactattcacccgcaaaagaagagtgggtaattaccgcagcgaacgcgaaaccgcaatgcgatattattcatgaagcctggcagagcagggctgttatccgctatgacatggcagtgccgctcaatttgtcagaacgcagcgcccggcaatccactggcagagtaggggtggtgttggttgtcactcttagtcataacagcaggcgtattgatgtggatatcaatcttgataaccaggctgacgatcatcgccttcgtgtcctggtccctacaccttttaacaccgacagtgttctggcagatacgcagtttggttcgctaacgcgccccgtgaacgacagtgcaatgaacaactggcagcaagaaggctggaaagaagcgccggttccggtatggaatatgctcaactatgttgccttacaggaagggcgtaacggcatggctgtctttagcgaagggttacgtgaatttgaagtcatcggtgaagagaagaaaacctttgccattacgttgctgcgtggcgtgggcttactgggcaaagaagatctgcttttaaggcctgggcggccttcgggaattaaaatgccagtcccggactcacaactacgtggtctgctttcttgtcgcctaagtttattgagttataccggtacgccaaccgccgctggtgtagctcagcaggcgcgagcatggctgactccagtacagtgttacaacaaaatcccatgggatgtgatgaagctcaacaaagccggattcaacgtgccggaaagttatagtttgttgaaaatgcccccagtgggatgcctgataagcgcacttaagaaagctgaagaccgacaagaagtgattttacggctgtttaatccggctgaatcagcaacctgtgatgcgactgttgctttcagtcgcgaggtgatttcttgctcagaaacgatgatggatgaacacattaccaccgaggaaaatcaaggttcaaatctatcggggccttttttacccggccagtcacggacgttcagttaccggcttgcctgaatagcaatcaaaccgaagccacatatgcgcggccagattgttgacaaagggcgctttgttcatgccggatacggcatgaacgctttattcggtctacaaaagcaggcaaattcaatatattgcagagatgatgtagacactggcaagcgtagcgcatcaggtaattttgcgtttatcttcactctcaagccacgtatatgtggctttatttttaacaaaataataaccctgggtgagttaattataatataattataagttaactaaatgttaatattggcggggtggatttatgcctttattagtaatcctgaaactctgcgtcgtattagccagtgaccaaaaaaagaattaaggtcaaccgtgctgtttttgcttcgtctctttttatctttaattgccaaccgaaactaatttcagccttataactcacacattttaaacataaatgtcactaaagttaccttattgaaacatgattaacataatttgtaggaattgatatttatcaatgtataagtcttggaaatgggcatcaaaaagagataaattgttctcgatcaaattggctgaaaggcggtaatttagctataaattgatcaccgtcgaaaaatgcaaatttgcttcaacaaaaacctgtttattgtaaggattttgcggcgtaatatatacgtgggatcaatttgagtttttattaacatgtttgcaacctttctttacgccgtttttgtgtgcattcacatggtatgatgaaagtgttcaaacaaatttctattggggcatgcgtgtgaccctttctaacggggttcactctcggagtcttcatgcgatgagcaaggagtcatgatgttagatatagtcgaactgtcgcgcttacagtttgccttgaccgcgatgtaccacttcctttttgtgccactgacgctcggtatggcgttcctgctggccattatggaaacggtctacgtcctctccggcaaacagatttataaagatatgaccaagttctggggcaagttgtttggtatcaacttcgctctgggtgtggctaccggtctgaccatggagttccagttcgggactaactggtcttactattcccactatgtaggggatatcttcggtgcgccgctggcaatcgaaggtctgatggccttcttcctcgaatccacctttgtaggtctgttcttcttcggttgggatcgtctgggtaaagttcagcatatgtgtgtcacctggctggtggcgctcggttcaaacctgtccgcactgtggattctggttgcgaacggctggatgcaaaacccaatcgcgtccgatttcaactttgaaactatgcgtatggagatggtgagcttctccgagctggtgcttaacccggttgctcaggtgaaattcgttcacactgtagcgtctggttatgtgactggcgcgatgttcatcctcggtatcagcgcatggtatatgctgaaaggtcgtgacttcgccttcgctaaacgctcctttgctatcgctgccagcttcggtatggctgctgttctgtctgttattgttctgggtgatgaatccggctacgaaatgggcgacgtgcagaaaaccaaactggctgctattgaagccgagtgggaaacgcaacctgcgcctgctgcctttactctgttcggcattcctgatcaggaagaggagacgaacaaatttgcgattcagatcccttacgcactgggcatcattgcaacgcgttccgtggataccccggttatcggcctgaaagagctgatggtgcagcatgaagaacgcattcgtaacgggatgaaggcgtactctctgctcgaacaactgcgttctggttctaccgaccaggcggttcgtgaccagttcaatagcatgaagaaagacctcggttacggtctgctgctgaaacgctatacgccaaacgtggctgatgcgactgaagcgcagattcaacaggcaaccaaagactccatcccgcgtgtagcgccgctgtactttgcgttccgtatcatggtggcgtgtggcttcctgcttctggcaatcatcgcgctctctttctggagtgtcatccgcaaccgcattggcgagaaaaaatggcttctgcgcgccgcgctgtacggtattccgctgccgtggattgctgtagaagcgggctggttcgtggctgaatatggccgccaaccgtgggctatcggtgaagtgctgccgacagctgtggcgaactcgtcactgaccgcaggcgatctcatcttctcaatggtgctgatttgcggcctgtataccctgttcctggtggcagaattgttcttaatgttcaagtttgcacgcctcggcccaagcagcctgaaaaccggtcgctatcactttgagcagtcttccacgactactcagccggcacgctaagacaggagtcgtcaaatgatcgattatgaagtattgcgttttatctggtggctgctggttggcgttctgctgattggttttgcagtcactgacggtttcgacatgggggtgggcatgctcacccgtttcctcggtcgtaacgacaccgagcgtcgaattatgattaactccattgcaccacactgggacggtaaccaggtttggctgatcaccgcgggcggcgcactctttgctgcctggccgatggtctatgccgctgcgttctccggcttctatgtggcgatgatcctcgtgctggcgtctttgttcttccgtccggtcggttttgactaccgctccaagattgaagaaacccgctggcgtaacatgtgggactggggcatcttcattggtagcttcgttccgccgctggtaattggtgtagcgttcggtaacctgttgcagggcgtaccgttcaacgttgatgaatatctgcgtctgtactacaccggtaacttcttccagttgcttaacccgttcggcctgctggcaggcgtggtgagcgtagggatgatcattactcagggcgcaacctatctgcaaatgcgtaccgtgggcgaactgcacctgcgtacccgtgcaacggctcaggtggctgcgctggtgacactggtctgtttcgcactggctggcgtatgggtgatgtacggtatcgatggttatgtcgtgaaatcgacaatggaccattacgcagcctctaacccactgaataaagaagtggttcgtgaagctggcgcatggctggttaacttcaacaacacgccaattctgtgggctattccggcactgggtgtggttctgccgctgctgaccatcctgactgcacgtatggataaagccgcgtgggcgtttgtgttctcctccctgacgctggcctgcatcatcctgacagccggtatcgcaatgttcccgtttgtgatgccgtccagcaccatgatgaacgcaagtctgacaatgtgggatgcaacttccagccagctgacgcttaacgtcatgacctgggttgcggtggttctggtaccgatcattctgctctacaccgcctggtgttactggaaaatgttcggtcgtatcaccaaagaagatattgaacgtaacacccactctctgtactaagtaaggagctaaaaatgtggtatttcgcatggattctgggaacgcttcttgcctgttcgtttggggtaatcaccgcgctggcgcttgaacacgtcgaatcaggcaaagccggtcaagaagacatctgatgagtaagattatcgcgactttgtatgcggtaatggacaagcgccccctgcgggcgctttccttcgtgatggcgcttctgttagcaggatgtatgttttgggacccatctcgttttgccgcgaagaccagtgaactggaaatctggcatggtttattgctgatgtgggccgtctgtgctggtgtgattcacggcgtgggctttcgtccgcagaaggttctttggcaagggattttttgcccattgcttgccgatattgttctcattgtcgggctgattttcttcttcttttaaatcagaattctctttaaaaaattatgggccgctccaggcccataaatttttacgctcccttaacttgccctcattcccaaacctcaatcgcgcgcgtatagtagcagcgtttaaaagctctaacttttgttgcattaccgggatgtaaagtgaatacaacgctgtttcgatggccggttcgcgtctactatgaagataccgatgccggtggtgtggtgtaccacgccagttacgtcgctttttatgaaagagcacgcacagagatgctgcgtcatcatcacttcagtcagcaggcgctgatggctgaacgcgttgcctttgtggtacgtaaaatgacggtggaatattacgcacctgcgcggctcgacgatatgctcgaaatacagactgaaataacatcaatgcgtggcacctctttggttttcacgcaacgtattgtcaacgccgagaatactttgctgaatgaagcagaggttctggttgtttgcgttgacccactcaaaatgaagcctcgtgcgcttcccaagtctattgtcgcggagtttaagcagtgactgacatgaatatccttgatttgttcctgaaggctagccttctggttaaacttatcatgttgattttgattggtttttcaatcgcatcttgggccattattatccagcggacccgtattcttaacgcagcggcgcgcgaagccgaagcgtttgaagataaattctggtctggaatcgaactctctcgcctctatcaagagagccaggggaaacgggataatctgactggttcggaacaaatcttttacagcgggttcaaagagtttgtgcgcctgcatcgtgccaatagccatgcgccggaagccgtagtggaaggggcgtcgcgtgctatgcgtatctccatgaaccgtgaacttgaaaatctggaaacgcacattccgttcctcggtacggttggctccatcagcccgtatattggtctgtttggtacggtctgggggatcatgcacgcctttatcgccctcggggcggtaaaacaagcaacactgcaaatggttgcgcccggtatcgcagaagcgttgattgcgactgcaattggtctgtttgccgctatcccggcagttatggcctacaaccgcctcaaccagcgcgtaaacaaactggaactgaattacgacaactttatggaagagtttaccgcgattctgcaccgccaggcgtttaccgttagcgagagcaacaaggggtaagccatggccagagcgcgtggacgaggtcgtcgcgatctcaagtccgaaatcaacattgtaccgttgctggacgtactgctggtgctgttgctgatctttatggcgacagcgcccatcatcacccagagcgtggaggtcgatctgccagacgctactgaatcacaggcggtgagcagtaacgataatccgccagtgattgttgaagtgtctggtattggtcagtacaccgtggtggttgagaaagatcgcctggagcgtttaccaccagagcaggtggtggcggaagtgtccagccgtttcaaggccaacccgaaaacggtctttctgatcggtggcgcaaaagatgtgccttacgatgaaataattaaagcactgaacttgttacatagtgcgggtgtgaaatcggttggtttaatgacgcagcctatctaaacatctgcgtttcccttgcttgaaagagagcgggtaacaggcgaacagtttttggaaaccgagagtgtcaaaggcaaccgaacaaaacgacaagctcaagcgggcgataattatttcagcagtgctgcatgtcatcttatttgcggcgctgatctggagttcgttcgatgagaatatagaagcttcagccggaggcggcggtggttcgtccatcgacgctgtcatggttgattcaggtgcggtagttgagcagtacaaacgcatgcaaagccaggaatcaagcgcgaagcgttctgatgaacagcgcaagatgaaggaacagcaggctgctgaagaactgcgtgagaaacaagcggctgaacaggaacgcctgaagcaacttgagaaagagcggttagcggctcaggagcagaaaaagcaggctgaagaagccgcaaaacaggccgagttaaagcagaagcaagctgaagaggcggcagcgaaagcggcggcagatgctaaagcgaaggccgaagcagatgctaaagctgcggaagaagcagcgaagaaagcggctgcagacgcaaagaaaaaagcagaagcagaagccgccaaagccgcagccgaagcgcagaaaaaagccgaggcagccgctgcggcactgaagaagaaagcggaagcggcagaagcagctgcagctgaagcaagaaagaaagcggcaactgaagctgctgaaaaagccaaagcagaagctgagaagaaagcggctgctgaaaaggctgcagctgataagaaagcggcagcagagaaagctgcagccgacaaaaaagcagcagaaaaagcggctgctgaaaaggcagcagctgataagaaagcagcggcagaaaaagccgccgcagacaaaaaagcggcagcggcaaaagctgcagctgaaaaagccgctgcagcaaaagcggccgcagaggcagatgatattttcggtgagctaagctctggtaagaatgcaccgaaaacggggggaggggcgaaagggaacaatgcttcgcctgccgggagtggtaatactaaaaacaatggcgcatcaggggccgatatcaataactatgccgggcagattaaatctgctatcgaaagtaagttctatgacgcatcgtcctatgcaggcaaaacctgtacgctgcgcataaaactggcacccgatggtatgttactggatatcaaacctgaaggtggcgatcccgcactttgtcaggctgcgttggcagcagctaaacttgcgaagatcccgaaaccaccaagccaggcagtatatgaagtgttcaaaaacgcgccattggacttcaaaccgtaatcgcgatgttgactgttcggacggtcaacatcaggcaccggttgccacggggttctggtagttttgtgtattttagtttgttaacattctgctaaattatcgtgggccatcggtccagataagggagatatgatgaagcaggcattacgagtagcatttggttttctcatactgtgggcatcagttctgcatgctgaagtccgcattgtgatcgacagcggtgtagattccggtcgtcctattggtgttgttcctttccagtgggcggggcctggtgcggcacctgaagatattggcggcatcgttgctgctgacttgcgtaacagcggtaaatttaatccgttagatcgcgctcgtctgccacagcagccgggtagtgcgcaggaagtacaaccagctgcatggtccgcactgggcattgacgctgtagttgtcggtcaggtcactccgaatccggatggttcttacaatgttgcttatcaacttgttgacactggcggcgcaccgggtactgtacttgctcagaactcgtacaaagtgaacaagcagtggctgcgttatgctggtcataccgccagtgatgaagtgtttgaaaaactgaccggcattaaaggtgcgttccgtactcgtattgcctacgttgttcagaccaacggcggtcagttcccgtatgaactgcgcgtatctgactatgacggttacaaccagtttgtcgttcaccgttcaccgcagccgctgatgtctccggcgtggtcaccagacggttctaaactggcttatgtgaccttcgaaagcggtcgttccgcgctggttattcagacgctggcaaatggcgctgtacgtcaggtggcttcattcccgcgtcacaacggtgcacctgcattctcgccagacggcagcaaactggcattcgccttgtcgaaaaccggtagtctgaacctgtacgtaatggatttggcttctggtcagatccgccaggtgactgatggtcgcagtaacaataccgaaccgacctggttcccggatagccagaacctggcatttacttctgaccaggccggtcgtccgcaggtttataaagtgaatatcaacggcggtgcgccacaacgtattacctgggaaggttcgcagaaccaggatgcggatgtcagcagcgacggtaaatttatggtaatggtcagctccaatggtgggcagcagcacattgccaaacaagatctggcaacgggaggcgtacaagttctgtcgtccacgttcctggatgaaacgccaagtctggcacctaacggcactatggtaatctacagctcttctcaggggatgggatccgtgctgaatttggtttctacagatgggcgtttcaaagcgcgtcttccggcaactgatggacaggtcaaattccctgcctggtcgccgtatctgtgataataattaattgaatagtaaaggaatcattgaaatgcaactgaacaaagtgctgaaagggctgatgattgctctgcctgttatggcaattgcggcatgttcttccaacaagaacgccagcaatgacggcagcgaaggcatgctgggtgccggcactggtatggatgcgaacggcggcaacggcaacatgtcttccgaagagcaggctcgtctgcaaatgcaacagctgcagcagaacaacatcgtttacttcgatctggacaagtacgatatccgttctgacttcgctcaaatgctggatgcacatgcaaacttcctgcgtagcaacccgtcttacaaagtcaccgtagaaggtcacgcggacgaacgtggtactccggaatacaacatctccctgggtgaacgtcgtgcgaacgccgttaagatgtacctgcagggtaaaggcgtttctgcagaccagatctccatcgtttcttacggtaaagaaaaacctgcagtactgggtcatgacgaagcggcatactccaaaaaccgtcgtgcggtactggtttactaagagaattgcatgagcagtaacttcagacatcaactattgagtctgtcgttactggttggtatagcggccccctgggccgcttttgctcaggcaccaatcagtagtgtcggctcaggctcggtcgaagaccgcgtcactcaacttgagcgtatttctaatgctcacagccagcttttaacccaactccagcaacaactttctgataatcaatccgatattgattccctgcgtggtcagattcaggaaaatcagtatcaactgaatcaggtcgtggagcggcaaaagcagatcctgttgcagatcgacagcctcagcagcggtggtgcagcggcgcaatcaaccagcggcgatcaaagcggtgcggcggcatcaacgacgccgacagctgatgctggtactgcgaatgctggcgcgccggtgaaaagcggtaatgcaaacacggattacaatgcagctattgcgctggtgcaggataaatcccgccaggatgacgcaatggtggcatttcagaatttcatcaaaaattaccctgattcaacttacctgccaaacgccaattattggctgggtcagttaaactacaacaagggtaaaaaagatgatgcggcgtactattttgcttcggtagtgaaaaactatccgaagtcaccaaaggctgcagatgcgatgtttaaagtcggcgtcatcatgcaggacaaaggtgacaccgcaaaagcgaaagccgtataccagcaggttatcagtaaataccctggtactgatggcgctaaacaggcacaaaaacgtctgaacgcgatgtaatgcataacacacgaccagaagtcgcattatttctggtcgtgtcgtgcgaatcataagcagttgagtgatctacatcgaaatttttgttgcgctcaagtctgaaatcagtaatatatgccgccgttgccacgggatatcaaacaaaccgaaagcaacgaaaaagtgggtcgttagctcagttggtagagcagttgacttttaatcaattggtcgcaggttcgaatcctgcacgacccaccaatcgctaaggtggaagcggtagtaaaacgtgaaggataacgttgcatgagcaacggcccgaagggcgagacgaagtcgagtcatcctgcacgacccaccactaacatagttagttgtagtatccagcgtagtatcgggtgattagctcagctgggagagcacctcccttacaaggagggggtcggcggttcgatcccgtcatcacccaccaccgggtcgttagctcagttggtagagcagttgacttttaatcaattggtcgcaggttcgaatcctgcacgacccaccagttttaacatcgaagacagatgttaagcgtgtaggataacgttgcgtcagcaacggcccgtagggcgagcgaagcgagtcatcctgcacgacccaccactaatgacggtgggttcggtggaagtagtttgtagtatccagcgcagtatcgggtgattagctcagctgggagagcacctcccttacaaggagggggtcggcggttcgatcccgtcatcacccaccactcgggtcgttagctcagttggtagagcagttgacttttaatcaattggtcgcaggttcgaatcctgcacgacccaccagttttaacatcaaactcagatgttaagcgtgaaggataacgttgcgccagcaacggcccgtagggcgagcgaagcgagtcatcctgcacgacccaccaatcttaaagattggccccgagtaaaaatctttcaggtaacacccgtatgggtcgttagctcagttggtagagcagttgacttttaatcaattggtcgcaggttcgaatcctgcacgacccaccaatttaaaggtggttactggtagagaacgtgaaggataacgttgcgttagcaacggcccgaagggcgagacgaagtcgagtcatcctgcacgacccaccatcctgaatgattaaggcagcataatcccgcaaggggtcgttagctcagttggtagagcagttgacttttaatcaattggtcgcaggttcgaatcctgcacgacccaccaatgtaaaaaagcgccctaaaggcgcttttttgctatctgcgatactcaaagattcgaacctgcagcaggtttgagttgagcgcagcgaaacaacggagccgctcgcggcgacggcccgaagggcgagcgaagcgagtcatcctgcacgacccaccaatgtaaaaaagcgccctaaaggcgcttttttgctattcaggcatcctcaatttcactttgtaaacctgatgacatcgtcagagcttactgtgcaagcaactctatgtcggtggaattaggcgtaaaatgacgcatcctgcacattaggcgtaattcgagtgacttttccccaccattcgactatcttgtttagcatataaaacaaattacaccgataacagcgaatattacgctaatgtcggttttaacgttaagcctgtaaaacgagatggtaagatgagcgtaatgtttgatccagacacggcgatttatcctttccccccgaagccgacgccgttaagcattgatgaaaaagcgtattaccgcgagaagataaaacgtctgctaaaagaacgtaatgcggtgatggttgcccactactataccgatcccgaaattcaacaactggcagaagaaaccggtggctgtatttctgattctctggaaatggcgcgcttcggtgcaaagcatcccgcttctactttgttagtcgctggggtgagatttatgggagaaaccgccaaaattctcagtccggaaaaaacaattctgatgccgacacttcaggctgaatgttcactggatctcggctgccctgttgaagaatttaacgcattttgcgatgcccatcccgatcgtactgtcgtcgtctacgccaacacttctgctgcggtaaaagcgcgcgcagattgggtggtaacttcaagcattgccgtcgaacttattgatcatcttgatagtttgggtgaaaaaatcatctgggcacccgacaaacatctggggcgttacgtgcaaaaacagacgggtggagacattctatgctggcagggtgcctgtattgtgcatgatgaatttaagactcaggcgttaacccgcttgcaagaagaatacccggatgctgccatactggtgcatccagaatcaccacaagctattgtcgatatggcggatgcggtcggttccaccagtcaactgatcgctgctgcgaaaacattgccacatcagaggcttattgtggcaaccgatcggggtattttctacaaaatgcagcaggcggtgccagataaagagttactggaagcaccaaccgcaggtgagggtgcaacctgccgcagctgcgcgcattgtccgtggatggccatgaatggccttcaggccatcgcagaggcattagaacaggaaggaagcaatcacgaggttcatgttgatgaaaggctgcgagagagggcgctggtgccgctcaatcgtatgctggattttgcggctacactacgtggataacgaataataaggcgtaacgttacgctttgggggaaagatggatttttttagtgtgcagaatatcctggtacatataccaataggggcaggcggttatgatctctcatggatcgaagcggtaggcacgatcgccgggttgctgtgtattggccttgccagtctggagaagatcagcaactacttctttggcctgatcaacgtcaccttgtttggcattattttctttcagattcagctgtatgccagcctgctattacaggtgtttttctttgccgcgaatatttacggttggtatgcgtggtcgcgacaaaccagtcagaacgaggcggagttgaaaattcgctggttgccattgccgaaggcactcagctggttggcggtttgcgttgtttcgattggtctgatgacggtatttatcaatccggtgtttgcatttttgacccgcgtggcagtcatgatcatgcaagcattaggattacaggttgtgatgcctgaactgcaaccggacgctttcccgttctgggattcatgcatgatggtgttatctatcgtggcaatgattctgatgacgcgtaagtatgtggaaaactggctgttgtgggtgattattaacgtgattagcgtcgttatttttgcacttcagggcgtttacgccatgtctctggagtacatcatcctgacctttattgcgctcaacggcagccggatgtggatcaacagcgcacgtgaaagaggctcacgcgcgctgtcccattaatggtgatgatgtgaatggccagacaccccttcattcaggtggcagtctggcccatgacaaggttgatattccatctgaatggtggcgtgctcaatctgatagtgatccatcaggtagtgttggatctgatccaacaaggcatcgtgatcgtgtggcgggatcacctgcacatgcaacgtcatcaccggcttctcgcctaccatccatacatgtacatggtgcacattgcggacttccgggatttcccggcacatacgacgcttcagttcagcgatatccagcgataccggtgcaccttcaagtaattcattcacgctatctttcaacagtcgccacgcgctacgcagaaccagaagcgacaccagtatcgagagaatggggtcagcaggtgtccagccagtccagataataatcaacgcggcaataatagccccaaccgaacccagcaggtccccgagcacatgcagtgccgctgctcgtacgttgaggtttttctcttcgctgccgtgatgaagtaaccagaaagaaagtatatttgccagcaacccagccacggcaattgccatcatcatgccgccctcgaccggacgcggcgtgcggaagcgttctatcgcctcccagacaatcaaaatggtaattaccacgagggctatggcattcacaaacgccgcgagcgtggtcagtcttagccaaccgaaagtgtggcgaatggtgggaggacgacgtgaaaattgcacggcgagtagggcgaaaagcagggcggcagtatcggtcaacatatgacccgcatcggccagcaatgccagagaaccagaaagaaaaccaccaacgacttctaccagcataaacccggcagtcacgccgaaagcatacaacaagcgacgagcattattatcttctggcaggtgtgaggacgtgtgtgagtgtgagtgcgccatgacgagtcatcccttaattattctcacttaactttatgacatcatactgcttttagaagtgaaaaattaaaagggagagactccgctctcccattattggctattttgcagggttactgcgtggtaccgtcggttttggtatcgacatcattattgatgccatcaccggtttgtacctttttattgatatccggacagcgaccatctttgcacatggtgttcttgtgctcttcatctttggtcattccgtcattgttcattgaagaaccatccgaatgcagcattgtgccgccagaaccggtatttaccccgttattgtcgacgttatttggcgcgacattttcacgggcgtcaggggctacctggcccgcatcagctgcggcgtttgcctggccgttattagtttgcgctccgctatcggcagccagtgcggcaccgctggcaaggcttagagtggcagtcagaaataatgtggccagttttgtcattttcataggatgctcctgttatggtcgttatgtcggataacctcttccaacagtgcatttgcaggtgaatataaggcattggtttaagatttcagccaggttatgaaacgcagcagagaatcttgaaataattaacaaacaaaggagttacagttagaaattgtaggagagatctcgtttttcgcgacaatctggcgtttttcttgctaattccaggattaatccgttcatagtgtaaaaccccgtttacacattctgacggaagatatagattggaagtattgcattcactaagataagtatggcaacactggaacagacatgaattatcagaacgacgatttacgcatcaaagaaatcaaagagttacttcctcctgtcgcattgctggaaaaattccccgctactgaaaatgccgcgaatacggttgcccatgcccgaaaagcgatccataagatcctgaaaggtaatgatgatcgcctgttggttgtgattggcccatgctcaattcatgatcctgtcgcggcaaaagagtatgccactcgcttgctggcgctgcgtgaagagctgaaagatgagctggaaatcgtaatgcgcgtctattttgaaaagccgcgtaccacggtgggctggaaagggctgattaacgatccgcatatggataatagcttccagatcaacgacggtctgcgtatagcccgtaaattgctgcttgatattaacgacagcggtctgccagcggcaggtgagtttctcgatatgatcaccccacaatatctcgctgacctgatgagctggggcgcaattggcgcacgtaccaccgaatcgcaggtgcaccgcgaactggcatcagggctttcttgtccggtcggcttcaaaaatggcaccgacggtacgattaaagtggctatcgatgccattaatgccgccggtgcgccgcactgcttcctgtccgtaacgaaatgggggcattcggcgattgtgaataccagcggtaacggcgattgccatatcattctgcgcggcggtaaagagcctaactacagcgcgaagcacgttgctgaagtgaaagaagggctgaacaaagcaggcctgccagcacaggtgatgatcgatttcagccatgctaactcgtccaaacaattcaaaaagcagatggatgtttgtgctgacgtttgccagcagattgccggtggcgaaaaggccattattggcgtgatggtggaaagccatctggtggaaggcaatcagagcctcgagagcggggagccgctggcctacggtaagagcatcaccgatgcctgcatcggctgggaagataccgatgctctgttacgtcaactggcgaatgcagtaaaagcgcgtcgcgggtaaggtttaattgtcggatgcgccgtcagagtggcgtatccgatgaatcaccacaggcctgataagtcgcgcagcgtcgcatcaggcaatgtgctccattgttagcaacaaaaaagccgactcacttgcagtcggctttctcattttaaacgaatgacgtttacttcgctttaccctggtttgcaaccgccgctgctttcgctgcgatctcgtcagcattacccagataatagcgtttcagcggtttgaaattctcgtcgaactcatacaccagcggcacgccagtcgggatattaagctcaagaatctcttcttcgctcatgttatcaagatatttcaccagcgcacgtaaagagttaccgtgtgcagcgatgatcacgcgctcaccgctcttcatacgcggcagaatagtttcattccagtaagggatcacgcggtcaatggtcagcgccaggctttccgtcagcggcagttctttctcgctcagtttcgcgtaacgcggatcgtgacccggataacgctcatcatctttagtcagttccggcggagtcactgcaaaaccacgacgccactgtttcacctgctcgtcgccatacttttcagcagtttccgctttgttcagaccctgcaacgcaccgtagtgacgttcgttcagtttccaggatttctcaacgggcagccatgcctgatccagttcgtccagcacattccacagggtatggatagcgcgtttcagcacagaagtgtaagcaaagtcaaagctgtaaccttcctctttcagcagcttacctgctgcttttgcttcgcttacgcctttctcagacagatccacgtcgtaccaaccggtgaaacggttttctttgttccactgactttcgccatgacgaaccagaaccagcttagttacagccatatacttactcctcaaatcatcttttaatgataataattctcattatattgccgcgacgaagcaacagcaatgcttacgcataaccatagcgaaaatagtggcgcagtgtaaggttgttgtgaatattgagttgcaaatatgtcggtgtttgctggtgatttgaacaatatgagataaagccctcatgacgagggcgtaacattactcagcaataaactgatattccgtcaggctggaatactcttcgccaggacgcaggaagcagtccggttgcggccattcagggtggttcgggctgtccggtagaaactcgctttccagagccagcccttgccagtcggcgtaaggttcggttccccgcgacggtgtgccgccgaggaagttgccggagtagaattgcagagccggagcggtggtgtagaccttcagctgcaatttttcatctgctgaccagacatgcgccgccactttcttgccatcgcctttggcctgtaacaagaatgcgtgatcgtaacctttcactttgcgctgatcgtcgtcggcaagaaactcactggcgatgattttggcgctgcggaaatcaaaagacgttccggcgacagatttcaggccgtcgtgcggaatgccgccttcatcaaccggcagatattcgtccgccagaatctgcaacttgtgattgcgcacgtcagactgctcgccgtcaagattgaaatagacgtgattagtcatattcaccgggcaaggtttatcaactgtggcgcgataagtaatggagatacggttatcgtcggtcagacgatattgcaccgtcgcgccgagattacccgggaagccctgatcaccatcatctgaactcagggcaaacagcacctgacgatcgttctggttcacaatctgccagcgacgtttgtcgaacccttccggcccgccgtgcagctggttaacgccctgacttggcgaaagcgtcacggtttcaccgtcaaaggtataacggctattggcgatacggttggcataacgaccaatagaggcccccagaaacgcggcctgatcctgatagcattccgggctggcacagccgagcagcgcctcgcggacgctgccatcggaaagcggaatacgggcggaaagtaaagtcgcaccccagtccatcagcgtgactaccatccctgcgttgttacgcaaagttaacagtcggtacggctgaccatcgggtgccagtgcgggagtttcgttcagcactgtcctgctccttgtgatggtttacaaacgtaaaaagtctctttaatacctgtttttgcttcatattgttcagcgacagcttgctgtacggcaggcaccagctcttccgggatcagcgcgacgatacagccgccaaatccgccgccggtcatgcgtacgccacctttgtcgccaatcacagctttgacgatttctaccagagtgtcaatttgcggcacggtgatttcgaaatcatcgcgcatagaggcatgagactccgccatcaactcgcccatacgtttcaggtcgccttgctccagcgcgctggcagcttcaacggtgcgggcgttttcagtcagtatatgacgcacgcgttttgccacgatcgggtccagttcatgcgcaacagcgttgaactcttcaatggtgacatcacgcagggctggctgctggaagaaacgcgcaccggtttcgcactgttcacgacgggtgttgtattcgctgccaaccagggtacgtttgaagttactgttgatgatgacgacagccacacctttgggcatggaaactgctttggtccccagtgagcggcaatcgatcagcaaggcatgatctttcttgccgagcgcggaaattagctgatccatgatcccgcagttacagcctacaaactggttttctgcttcctgaccgttaagcgcgatttgtgcgccgtccagcggcagatgataaagctgctgcaatacggttccgaccgcgacttccagtgaagcggaagaacttaacccggcaccctgcggcacattgccgctgatcaccatgtccacgccgccgaagctgttgttacgcagttgcagatgtttcaccacgccacgaacgtagttagcccattgatagttttcatgtgcgacaatgggcgcatcgagggaaaactcgtcgagctgattttcataatcggctgccatcacgcgaactttacggtcatcgcgtggtgcacaactggatttgcccctatatttccagacatctgttatcacttaacccattacaagcccgctgccgcagatattcccgtggcgagcgataacccagcgcactatgcggatgccattcgttataatgctcgaacgcctctgcaaggttctttgctgccgttaacccgtctggtttgggcatgatactgatgtagtcacgctttatcgttttcacgaagctctctgctattccgttactctccggactccgcaccgccgtgttcttcggttcaagtcccaacatccgggcgaactggcgtgtttcattagcccggtagcatgaaccattatccgtcagccactccactggagacgacggaagatcgttgccgaagcggcgttccaccgctcccagcatgacgtcctgtactgtttcactgttgaagccgccggtagtgaccgcccagtgcagtgcctcacgatcacagcagtccagcgcgaacgtgacacgcagtctctctccgttatcacagcagaactcgaacccgtcagagcaccatcgctgattgctttctttcacggccactctgcctgtatgtgcccgtttcgatggcggtacagcaggttttcgctcaagcaacagcgcattctggcgcatgatccggtaaacacgtttggcattgatcgcaggcataccatcaagttctgcctgtctgcgaagcagcgcccatacccgacgataaccatacgttggcagctctccgataacatggtgtatacggagaagcacatccgtatcatcagtgtgacgactgcggcggccatccatccagtcatcggttcgtctgagaatgacgtgcaactgcgcacgcgacacccggagacaacggctgactaagcttactccccatccccgggcaataagggcgcgtgcgctatccacttttttgcccgtccatattcaacggcttctttgaggagttcattttccatcgttttcttgccgagcaggcgctggagttctttaatctgcttcatggcggcagcaagttcagaggcaggaacaacctgttctccggcggcgacagcagtaagacttccttcctggtattgcttacgccagagaaataactggctggctgctacaccatgttgccgggcaacgagggagaccgtcatccccggttcaaagctctgctgaacaattgcgatcttttcctgtgtggtacgccgtctgcgtttctccggccctaagacatcaatcatctgttctccaatgactagtctaaaaactagtattaagactatcacttatttaagtgatattggttgtctggagattcagggggccagtctaacaactgatcacggtttgataatcaatcgcgcagggcagaacgaaaccgtcgttgtagtcggtgtgttcaccaatcaaattcacgcggccaggcgcctgaatggtgtgagtggcagggtagccaaatgcgttggcaaacagagattgtgttttttctttcagactcatttcttacactccggattcgcgaaaatggatatcgctgactgcgcgcaaacgctctgctgcctgttctgcggtcaggtctcgctgggtctctgccagcatttcataaccaaccataaatttacgtacggtggcggagcgcagcagaggcggataaaagtgcgcgtgcagctgccagtgttgattctcttcgccattaaatggcgcgccgtgccagcccatagagtaggggaaggagcactggaagaggttgtcataacgactggtcagctttttcaacgccagcgccagatcgctgcgctgggcgtcggtcaaatcggtgatccgtaaaacgtgggctttgggcagcagtagcgtttcgaacggccaggcagcccagtaaggcacgacggctaaccagtgttcggtttcgacaacggtacggctaccgtctgccagctcgcgctgaacataatccaccagcattggtgatttctgttcggcaaaatattctttttgcaggcggtcttcgcgctcagcttcgttaggcaggaagctatttgcccaaatctgaccgtgcggatgcgggttagagcagcccatcgccgcgcctttgttttcaaaaacctgcacccatgggtacgttttccccagttctgcggtttgctcctgccaggttttgacgatttccgtcaatgctgcaacgctgagctctggcagcgttttactgtgatccggtgaaaagcagatcacccggctggtgccgcgcgcgctctggcaacgcatcagcggatcgtgactttctggcgcatctggcgtgtcagacatcaaagccgcaaagtcattagtgaaaacgtaagtcccggtgtaatcggggtttttatcgcctgtcacccgcacattacctgcgcagaggaagcaatctggatcgtgcgcaggtaacacctgtttggctggcgtttcctgcgccccctgccaggggcgcttagcgcggtgcggtgaaaccagaatccattgcccggtgagcgggttgtagcggcgatgtggatgatcaacgggattaaattgcgtcatggtcgttccttaatcgggatatccctgtggatggcgtgactgccagtgccaggtgtcctgcgccatttcatcgagtgtgcgcgttacgcgccagttcagttcacggtcggctttgctggcgtccgcccagtaggccggaaggtcgccctcgcgacgcggtgcaaaatgataattaaccggtttgccgcaggctttgctgaaggcattaaccacgtccagcacgctgttgcctacgccagcgccgaggttgtagatgtgtacgcctggcttgttcgccagtttttccatcgccacgacgtgaccgtccgccagatccattacgtggatgtaatcgcgtacgccagtaccatcttcggtcggataatcgttaccaaaaatcgccagcgagtcgcgacggcctacagcaacctgggcgatgtatggcatcaggttattcggaatgccttgcggatcttcgcccatatcgcccgacggatgcgcgccaaccgggttgaagtagcgcagcagggcaatgctccagtccggctgggctttttgcagatcggtgaggatctgttccaccatcagcttgcttttgccgtaagggctttgcggtgtgccggtcgggaagctttcaacgtatggaattttgggctgatcgccataaacggtggcggagaagctaaaaataaagtttttgacgttagcggcgcgcatggcgctaatcaggcgcagagtgccgttgacattgttgtcgtaatattccagcggtttttgtaccgattcgcccacggctttcagcccggcgaagtggatcacggtgtcgatagcgtgatcgtgcaggatctcggtcatcaacgcttcgttacgaatatcgccttcaacaaacgttggatgtttgccgcctaaacgctcgataacaggcagtacgctgcgcttactgttacagaggttatcaagaatgatgacatcatgaccgttttgcagtaattgcacacaggtatgacttccaatgtaaccgctaccaccggtaaccagaactctcataattcgctccattaggcttatggtatgaaataaccatagcataacaaagatgcgaaaagtgtgacatggaataaattagtggaatcgtttacacaagaatttagccgttttttatgcgcgattaagtgattataaaacagagggtttatgaatgattgcgctttttatctgaaaaaagacgcggtttcatgcctgcatgcgtcgaaccgttggccggagagggtgctaaggccgcctccggcaaggtcagcactaccgactcaatatatttttgtcagcacatagcgatagagtccaccgtccggcacgaactcaagacgatgggtaatacaggcaggcgcatcttcagcgtggtgcgaaacaaacaacaattgcgtttcaccttcgctaatcagcacatcaacaaaacggcggataagctggcgattcagcggatcaagcccctgtagtggttcatcgagaataagcaacgtcggatgtttcaccagtgcgcggacaatcagcgccagacgctgctgtccccaggaaagactatggaacggagcgtcagccgtgcgtttatcaatgccgagaatatccagccactgctgcaccagtttttgctggcgatccgaaacggcctgataaatgccaatcgaatcaaaatagccagaaagaatcacattacgcacggtagtgctgacccggtaatccagatgcaaactactgctgacgtaaccgatatgctttttgatatcccagatggtttcgccgctgccgcgacgtcgtccgaaaagcgtcaaatcgttgctgtaaccttgcggatgatcgccagtaaccaggcttaataacgtcgattttcctgcaccatttggcccgacaatttgccagtgttcgcctggattcacctgccagctaaggttattaagaatggggcgatcgttataagaaaccacgccattgttcagcacaatgcgcggttcgttggcgggtaaggcgtgacgtgctgaaggttcatccggctccggcagttgcacaccttcaagctgttcactatgcgccagttgcgcgacgagtgcttgttggagcagttcctctttagcgccagtttccgctaacgtgcaatccgccagcacgccagcaaactggacaaactccgggatctcatcgaagcgattgagcaccagtaccagagtaataccggactgatgtaacgaggcgagtcgctcagccagctgctgacgtgaggcaacatccaggccatcgaacggctcatcaagaatcaacaagtcaggctccgacatcagcgcctgacacagcagggtttttcgcgtctcgccagtggaaaggtatttaaagcgtcggtcgaggagggcggtaataccgaactgctgcgccagttgcatgcaacgcggtgcatcctttacttcatcctgaatgatctcagccgtagtgcgtccggtgtcatcttcgccagggccgagcatatcggtgttattccgctgccattcgtcgctgacgagtttttgcaattgctcgaaggagagacgagtgatgtgggaaaactggctttgccgttcacctttcaaaagcggaagttcccccgccagcgcgcgggccagggccgatttcccgcttccattcgaaccgacaaacgcccaactatcacccgcgtttaacgttagctgaggcaattgcagcgtttttgtgtcgctaagacgaaacgtgccttgcaaaatttgcaacgatgacattttatatcccactttgtgcagcgattactgacagggatacgtgtttcataacaaattgtcaacacgcttagcacagcgtggcgataatcacgctgtcggcattaaagtaggccgtgacattctgtccttgctgaagagaagtcgcttcatttaccggcactgtggcgcacagtgtttgcccgtcgggtagcgccattaatacttcgcactgctctgcgccgcgctcaatatgactaataatacccggtaattggttgtcagcgttttgcgcgaccgcctcgtcctgagtaatacctacccacggcgcttttagcaatatcaacacttctttgccttcatccagccccagacgcgcgccgctttgtgcggtaattgcgactttcaggcgtgtttttccgtcagccagtaagacatcaacatgctgttgaacgtcatcatgatcgcgggcggtgatggtaccgaaccactggttacgggcgctggtttgcagtgaaaaacgtgagatcgcggccagcaggctgttcagcggcagggcgtcatcgtcacttaacacatcaaaggctttttgctggatttgcgccagtaagtcatagagctgaatcagtcgctgaccatagcgggtcagtactgcgccgccgccacctttaccgcctgttgcgcgctcgaccagaatatgctcacttaactgattcatctcgttaatggcatcccaggcgcttttatagctaataccggcatctttcgctccctggctaatggaaccggaaagcgcaatgtgttttagtagcgaaatgcggcgcgggtcggcgaataatttttgttggagcttaagggtgagaaggatttcggcctgcataacaatgtcctggcaaaagtcttattgtgacggaaaacgaacgccacgcaaagctgaccgcacaaaaggggagtgcttttctgtgcttagcggttagaatagtctcatgactatatctggagttgaccatgttagagttattaaaaagtctggtattcgccgtaatcatggtacctgtcgtgatggccatcatcctgggtctgatttacggtcttggtgaagtattcaacatcttttctggtgttggtaaaaaagaccagcccggacaaaatcattgattccctgaatgcccgcttagtcgggcattttctttttctcaacttcctgcttttcctgccgatattttttcttatctacctcacaaaggttagcaataactgctgggaaaattccgagttagtcgttatattgtcgcctacataacgttacattaaggggttaccaatggctcgtaaatggttgaacttgtttgccggggcggcactctctttcgctgttgctggcaatgcactggcagatgaagggaaaatcacggtgttcgccgccgcatcactgactaacgcaatgcaggacattgctacgcagtttaaaaaagagaaaggcgtggatgtggtttcttctttcgcttcgtcatctactctcgcccgtcagattgaagcgggtgcgcctgcggatctgtttatttctgccgatcagaaatggatggattatgcggttgataaaaaagcgatcgatacagctacgcgtcagacactgctcggcaatagcctggtcgttgtagcaccgaaagccagcgtgcagaaagatttcaccatcgacagcaaaaccaactggacttcactgctgaatggcggtcgcctggcggttggcgatccggaacatgttcccgctggcatttatgcaaaagaagcactgcaaaaactgggcgcatgggatacgctctctccgaaactggccccagcggaagatgttcgtggggcgctggcgctggtcgaacgtaacgaagcgcctctgggcattgtctacggttctgacgcagttgccagcaaaggggtaaaagtggttgccaccttcccggaagattcacataaaaaagtggaatatccggttgctgttgtggaagggcataacaatgcgacagtgaaagcattttatgattatctgaagggaccgcaggcagcggaaatctttaaacgttacggatttacaatcaagtaatgatactgaccgatccagaatggcaggcagttttattaagcctgaaagtttcttccctggctgtgctgtttagcctgccgtttgggatcttttttgcctggttactggtgcgttgcacgtttccgggcaaagctctgctcgacagcgtactgcatctaccgctggtgttaccgcccgtggtcgtcggttacttattattagtttcgatgggacggcgcggatttatcggtgaacgtctgtatgactggtttggtattaccttcgcctttagctggcgcggcgcggttctcgctgccgccgtcatgtcgtttccgctgatggtgcgggcaattcgtctggcgctggaaggggttgatgtcaaactggaacaggccgcaagaacactgggggccgggcgctggcgcgttttctttactatcacgttaccgctgaccttaccgggaattattgttggtacggtactggcttttgctcgttctctcggtgagtttggtgcaaccatcacctttgtgtcgaacattcctggtgaaacgcgaaccattccttctgccatgtataccctgatccagacccccggcggggaaagtggagcggcgagactgtgcattatttctattgcgctggcgatgatctccctgttgatttcagaatggctggccagaatcagccgtgaacgggcggggcgctaatcatgctggaactgaatttttcccagacgttgggcaaccattgcctgactattaatgaaacgctgcccgccaatggcatcactgctatctttggcgtctccggtgccggaaaaacttcgctgattaacgccatcagtggactgacgcgcccgcaaaaagggcggattgtcctcaatgggcgggtactaaatgatgccgaaaaaggtatctgcctgacgccggaaaagcgtcgcgttggctatgtttttcaggatgcgcggctgttcccgcattacaaagtgcgtggcaatctgcgctacggcatgtcgaaaagtatggtcgatcagttcgataagctggtggcgcttttaggcattgaaccgttgcttgaccgtttaccaggcagcctgtccggaggcgaaaaacagcgcgtggcgattggtcgggctttgctgacagcaccggaattgctgttgctggatgaaccgctggcgtcactggatattccgcgtaaacgcgaactgttgccttatctgcaacggctgacacgggaaatcaacattccgatgttgtatgtcagccattcgctggatgagatcctccatctggcagacagagtgatggtactggaaaacggtcaggtgaaagcctttggcgcgctggaggaagtgtggggcagtagcgtgatgaatccgtggctgccgaaagagcaacaaagtagcattctgaaagtgacggtgcttgagcatcatccgcattacgcgatgaccgcgctggcgctgggcgatcagcatttgtgggtcaataagctggacgaaccgctgcaagctgcgctacgtatccgcattcaggcttccgatgtttctctggttttacaaccgccgcagcaaaccagcattcgtaacgtattgcgggcaaaagttgttaatagttatgacgacaacggccaggtggaagtggaactggaagtcggcggtaaaacgctgtgggcgcgtatcagcccgtgggccagggatgaactggcgatcaaacctggcctgtggctgtacgcgcaaattaaaagtgtgtcgataaccgcctgattaaatcaggtggctataaatgaactgggcaatgctgtcggtggtgttatcaccaatcacaatgttggcgcgcgcttttaccgcgtcatcggcgttgcccatcgccacgcctgtaccagcggcttccagcatactgatatcattaaagttatcgccgaatgccacgacgttttccatcgaccaaccttgcgcctcaacccatttcgtcaaacgtttacctttgctgttgccgccgcgtgcaatatcaacctgatcgtgccaggaccattcacactccagtcccagttcatgttcgacatgcttaccaaaatgctgcaattgcggcaggtcatcgtgcgtcagggcgaacttccatacggcgttaacttgttgcgccgtttcagccagagaagcgacttgtgtgaaagtcggacgctgttccggcggcagggtttgcgcccagttagatgtgcgaatgacatgcccggtcgggtgctcatagaccattgcatcatcgacatacatcagaccgtgaatgtggtgttcattcagcatctcaatgagttgcagggctttaataacgggcattgggtccgcttccagcacggtttttgcatgataatcatacaaataggtgccattacagcaaatagcaggtgtatccagcgccagcgcctgataaaaaggatgaatagcgacgtgatggcgacctgtgacgatgattaattgatagcctgcttcgcgagcgcgggccagggcttctatcgatgaaggaagcagggtctttttcggggtcaataaggtgccgtctaagtcgagagcaatcacgcgtgtggtcatggcgtattccagattaaggttaagaattttcgtctgcgcgaatggtacaccgataccactatcggacaaaattctgcgttttaattcagcattcaccgccaaaagcgactaattttagctgttacagtcagttgctaaatgcaaaggagcattcatgaagcaaacagtttatatcgccagccctgagagccagcaaattcacgtctggaatctgaatcatgaaggcgcactgacgctgacacaggttgtcgatgtgccggggcaggtgcagccgatggtggtcagcccggacaaacgttatctctatgttggtgttcgccctgagtttcgcgtcctggcgtatcgtatcgccccggacgatggcgcactgacctttgccgcagagtctgcgctgccgggtagtccgacgcatatttccaccgatcaccaggggcagtttgtctttgtaggttcttacaatgcgggtaacgtgagcgtaacgcgtctggaagatggcctgccagtgggcgtcgtcgatgtggtcgaggggctggacggttgccattccgccaatatctcaccggacaaccgtacgctgtgggttccggcattaaagcaggatcgcatttgcctgtttacggtcagcgatgatggtcatctcgtggcgcaggaccctgcggaagtgaccaccgttgaaggggccggcccgcgtcatatggtattccatccaaacgaacaatatgcgtattgcgtcaatgagttaaacagctcagtggatgtctgggaactgaaagatccgcacggtaatatcgaatgtgtccagacgctggatatgatgccggaaaacttctccgacacccgttgggcggctgatattcatatcaccccggatggtcgccatttatacgcctgcgaccgtaccgccagcctgattaccgttttcagcgtttcggaagatggcagcgtgttgagtaaagaaggcttccagccaacggaaacccagccgcgcggcttcaatgttgatcacagcggcaagtatctgattgccgccgggcaaaaatctcaccacatctcggtatacgaaattgttggcgagcaggggctactgcatgaaaaaggccgctatgcggtcgggcagggaccaatgtgggtggtggttaacgcacactaaccgctgatttacccggcgcagtctctcctgcgccggtgtattaacctatctcctgtaacgcgtgtctctggcgttcgacgatattggtccacaaattgtctttatcgtcagtccataaattaatcagcaaggcaaaaaagcgttctgctgctggagaaagtacggcatctttacggcgaattattcccaatgttcgacgtataacgggttccaccaatgggataccaataatcgaagaatagggcgcatgaggcattgccaggccaggaagcgccgaaatccccagtcccgcctccaccagtcctaatgacgtcgaaagatgacgcacttcgtaaaaccagtccagcttccagggcttgtcggccagctgttgttctatcaacagtcggttgccgctggaggagcgtacgccaatcattttgtaacccactaactcctgccattctacaagctgctttttggccaatggatggtcacgccgacaggccagcacgaacggctcgttgaccagtggggtaaaatcaatggatgaatttgtgacgttgttcatgtttatgccaaagtctgattcgttacacagcaccgattccatgcaattattcgtgccttgttccagaatccgcactttaatattgggatacagctcattaaatttaccgattgccagcggtaaaaaataaaatactgcggtcggaatacacgctaacgtcaccataccacgatgataagcattcatatcacgaatattaaaaagcgtttcatcgaatttctttattaattcccgcgcctccgggagcaacctttttcctgcttttgttaacgtaaccttgcgagttgtacgctcaaatagttgaacatgtaaatcttcctccatcttttttattcttcgcgttaatgcaggttgcgtaatattgagtaatttagcggcattgttaaacgaactggactctgccagtatgacaaatgccttcatacttgataattcatgcttcattattactccggaaaatggaagcgacgattttgggtggctggccgttaaaaattttaactgcatttagccaacttaaattaatgaaaaaatgttattaatcgttgagctaaagtcattagagatgctttgcccttaatgtaaccatatcgcaataagttatgtttttaaattgagggcattattatgaaaaaaataccctgcgtgatgatgcgaggtggaacctcgaggggcgcgttcctgttagcggaacatttacccgaagatcaaacgcagcgcgataaaatattgatggcaattatgggttccggtaacgatctggaaattgacggtattggcggcggtaatccactgaccagtaaagtcgccattattagccgttccagcgatccgcgtgctgatgtcgattatctgtttgcgcaggtaatcgttcatgagcaacgtgtcgataccacgcctaactgcggcaatatgctgtctggtgttggggcattcgccattgaaaatggtttgattgcagcgacttcgccagttactcgcgtacgtatccgcaacgtcaatacgggtacgttcatcgaagctgatgtgcaaacgccaaatggtgttgtcgagtacgagggtagcgccagaattgacggcgtaccgggtactgccgcaccggttgcgctcactttcctgaatgccgctggaaccaaaaccggaaaagttttcccgactgataatcagattgattattttgacgatgtcccggtgacctgtatcgatatggcgatgccagtcgtcattattccggctgaatatctgggaaaaacaggttatgaattaccggcggaactggatgccgacaaagcattattagcccgcattgaatctatccgtctacaagcgggtaaagcaatgggcttaggtgatgtcagtaatatggttatccctaaacctgtgcttatttctccagcgcagaaaggcggggcaattaatgtgcgttattttatgccgcattcttgccatcgcgcgctggcgataaccggtgctattgctatttccagtagttgtgcattggaaggcaccgtcacccgacaaatcgtcccttctgtaggatacggcaatatcaatattgaacaccccagtggtgcgctcgacgttcatttaagtaatgaaggtcaggatgccacgacgttacgcgcatctgttattcggacgaccagaaaaatattttccggtgaagtttatcttccctgaaaaaattcgttgtcaggataaggacaatcaataaaggacttctgtatgagtcatacagaaagaacaggattttaaatgaataagaaatcgttatggaagctaattctgatattagcgatcccatgtattattggttttatgccagctccggcaggattaagcgaactggcgtgggtgctttttggtatttacctggcggccattgtggggctggttatcaagcctttcccggaacctgtcgtactgttaattgccgttgctgcctcaatggtggtggtcggtaacttatccgacggtgcgtttaaaaccaccgccgtattaagcggttactcttcaggtaccacctggctggtgttctcggcgtttaccttaagcgccgcatttgtgaccaccggtttaggtaaacgtattgcctatctgctgattggtaaaatcggtaacaccacgctgggtctgggttacgttacggtattcctcgatctggtactggctccggcaacaccgtctaacaccgcgcgtgcgggcggcattgtgttaccgatcatcaacagcgtggcggtggctttggggtccgaaccggaaaaaagtccgcgtcgtgtcggacattacctgatgatgtccatttacatggtcaccaaaaccaccagctatatgttctttaccgcaatggcggggaacattctggcgctgaaaatgatcaacgacattctgcacctgcaaattagctggggtggatgggcgctggcagccggattgccgggcatcattatgctgctggtcaccccgctggtgatttacaccatgtatccaccagaaattaagaaggtggataacaaaaccatcgctaaagcgggccttgccgaactaggaccgatgaaaatccgcgaaaaaatgctgctcggtgtctttgtgctggcgctgctgggctggattttcagtaagtctctgggggttgatgaatccaccgtggcaatcgttgttatggcaaccatgctgctgctgggtatcgttacctgggaagacgtggttaaaaataaaggcggctggaataccttaatctggtacggcggtattatcggcttaagctccttattatcgaaagttaaattcttcgaatggttagctgaagtctttaaaaataacctggcatttgatggtcacggtaacgttgctttcttcgttattattttcctcagcattatcgtgcgttatttcttcgcttccggtagtgcctatatcgttgctatgttaccggtatttgccatgctggcgaacgtctccggcgcaccgttaatgttaaccgcgctggcactgttgttctccaactcctatggcggcatggttactcactatggcggcgcggcaggtccggtcatctttggcgtgggttataacgatattaaatcctggtggttggtcggtgcggtactgacgatattaaccttcctggtgcatatcaccctcggcgtgtggtggtggaatatgctgatcggctggaacatgctgtaaatattctcgtcatacttcaagttgcatgtgctgcgtctgcgttcgctcaccccagtcacttacttatgtaagctcctggggattcactcgcttgtcgccttcctgcaactcgaattatttagagtatatccatttattatctttctgcgcacttcacggtgcgcagatatctggagcatttgatgatcaagttatctgaaaaaggcgtgtttctcgccagtaataacgaaataattgccgaagaacatttcaccggcgaaattaaaaaagaagaagccaaaaaaggcactattgcctggtctattctctcttcgcataatacgtccggaaatatggataaacttaaaattaagtttgattcattagcctctcacgatattacctttgttggtattgtacagaccgctaaagcgtccggtatggaacgtttcccgctgccgtatgtgctgaccaactgccataactcactctgcgccgtcggcggcactattaacggtgatgaccatgtttttggtttatcggcggcccagcgttatggcggtatttttgtgcctccgcatattgcggtcatccatcaatatatgcgtgagatgatggcaggcggcggcaaaatgatcctcgggtcagacagccacacccgttacggtgcattagggacaatggcagtcggtgagggcggcggtgagttggtaaaacagctgcttaatgacacctgggatatcgactatccgggcgtggttgcggtgcatctgaccggaaaacctgcgccgtatgtggggccacaggatgtggcgctggctatcattggcgcggtgttcaaaaacggttacgtcaaaaacaaagtcatggagttcgttggaccgggcgttagcgcgctctctaccgatttccgtaacagcgttgacgtgatgaccactgaaacgacctgtttaagttctgtctggcaaaccgatgaagaagtccataactggctggcgctgcacggtcgcggccaggattactgccagcttaaccctcaaccgatggcgtactacgatggctgcatcagcgttgatttaagcgccatcaaaccaatgattgcgctgccgttccacccgagcaacgtgtatgaaatcgacacactgaaccagaacctgaccgacattctgcgtgagattgaaattgagtccgaacgcgtggcgcacggtaaagccaaactctcgctgctggataaagtggaaaatggtcgcctgaaagtgcagcaggggattatcgcgggctgttctggcggtaactacgaaaacgtcatcgcggcggcgaatgcactgcgcggtcaatcctgtggcaatgacaccttctcgctggcagtttacccgtcatcacagccggtgtttatggatctcgccaaaaaaggtgtggtagcagatttgattggcgcaggcgcaatcatcagaaccgcgttctgcggcccatgctttggcgcgggcgatacgccaatcaacaacggtttgagtattcgccacaccacgcgtaacttcccgaaccgcgaaggctctaagccagctaatgggcagatgtcagcggtggcgttgatggacgctcgttctatcgctgcgactgcggcaaacggtggctatttaacctctgccagcgaacttgattgctgggacaacgtgccggagtacgccttcgatgtaacgccgtataaaaaccgtgtttatcagggctttgtgaaaggggcaactcagcaaccgctgatttacgggccgaacattaaagactggccggaattgggtgcgctgactgacaatatcgtcctgaaagtgtgctcgaagatcctcgacgaagtgaccaccaccgacgaactgattccttccggtgaaacctcttcttatcgttcaaatccgattggtctggcggagtttaccctgtctcgccgcgatcccggttatgttagcagaagtaaagcgactgctgagctggaaaatcagcgtctggcggggaatgtcagcgagctgacagaggtgtttgcgcgcattaagcagattgctggtcaggagcatattgatccgctgcaaactgaaattggcagcatggtctatgcggtgaaaccaggcgatggttctgcgcgtgaacaggcggcgagctgccagcgtgtgattggcggtctggcgaatattgccgaggagtacgcgactaaacgctatcgttctaacgtcatcaactgggggatgttaccgctgcaaatggcggaagtaccaacctttgaagtgggggattacatttacatccctggcattaaagcggcgctggataatccgggtacgacgtttaaaggttatgtgatccatgaagatgcgccggtaacggaaattacgctctatatggaaagtctgactgctgaagagcgcgagattatcaaggcgggtagtttgattaacttcaataaaaaccgtcagatgtaaaaagcgccatgtgaatgtaggtcgcattcggcacttattgtcggatgcgatgcttgcgcatcttatccgacctacgaatcgcatcgaatctgtaggccagataaggcattttcgcagcatccggcacttattgtcggatgcgatgcttgcgcatcttatccgacctacaaatcgcatcgaaccgtaggccggataaggcgtttacgccgcatccggcaaatagttaattgctcttacttcttcgcctctgcaaccactttactacccacgccgcggttattgtattcccacatgcggttgtagttagtgtcattcagattgcgctgtatttcgtcgttatcatctacgctgccggtattacccgcaaacggacgattagagatcaccgcatcggcccacggtttagccgtgttaaaaccttcgttgatggcgctatcacggatcaccacctgaccgttggtattggcatcaacatccagcgagcggcccagttgcgccacaccatcaccgaaagcattgaaacggctgtttacggcgaggaaaccgtagtaaatgttggacagcgtagccggtgcaaacacatacgcttcttgctgagtacgtgagttcaccacgcggaattcggtgttatcgaacaccactgcgccgcgaccagaaacgatatccacatccccttcaatgtagctgttggtcaccagcgtacgcggctgacgattcgtttccagacggttctgcacaccgctgttggtgacaaagaaggtgttctgacgaccgagaatgttaacgttgttaatctgtacctggtcaccatcagtacgcagtgccaccgccggatggttacctgcatctacgctatcgcccagcgtgttttcgatggtcagattttgcagttgcaggccattgttttgtgaccagaagaccgcagagcagagaacaccgatactgtcgctgcgtttgctctggcagctatcgtacatataccacgctggtttacctggcatatatttgccgcgcgggttgacgtcgtgacgccagtcggcagggctcatgccaccatcaagggaaagcccaatcttcacatcaatcggtttttcacctgtaccgtacagagtaattccacccggagcggcagggacatataccgttccctgatactcaccaggcatcacggcaatatactggcgcttgttggtacgcttgataattgccgcatctaccgccgcctgaatcgtggtatgcgttacaccttgagtgcccgccgggccgacaacaaagtcaggttgcgcaggcagggtaatcggggaaggattccacgctgcagcacctggtgtcagggatgcaaaatagtgttgagcatcgaaattctgcgcttcttttgccgacagaatcgggcgagaagaggtaccaggcgcggtttgatcagaaggacgttgatcgggcggggttgagctacaggcggtcagcgtcacgccaaaagccaatgccagcgccagacgggaaactgaaaatgtgttcacaggttgctccgggctatgaaatagaaaaatgaatccgttgaagcctgcttttttatactaacttgagcgaaacgggaaggtaaaaagacaaaaagttgtttttaatacctttaagtgataccagatggcattgcgccatctggcagagtgattaactaaacatcgcagtaatcgaggcgcttgccagagagtggaaatgaacgttaaacccgaccatcgcgccgctggcaccttcatcgacatcaatacgttctatatccagcgcgtgaacggtaaaaatgtagcgatgagtttcgcctttcggcggtgctgcgccatcgtacccggttttaccaaagtcggtacgcgtctgcaaaacgccgtctggcattgctaccagaccagagccaaacccttgcggtaatacgcgggtatcagcgggtaagttaacaactacccagtgccaccagccggagccggttggcgcatccgggtcgtagcaggtgacaacaaaacttttcgttcccgcaggaacatcatcccacgccagatgcggtgaaatattatcgccatcgtaacccatgccgttaaagacatgacgatgcggcaatttatcgccatcgcgcagatcgttactgatgagtttcatgaaccctcctttcttgtttgcagaaagtgtagccagaaaccctcacgcggacttctcgttattggcaaaaaaatgtttcatcctgtaccgcgcggttaaccgctgcggtcagacgctgcaactgttgcgggagaataatatagggcggcatcaggtaaatcagtttgccaaaaggccggatccagacaccctgttcgacaaagaatttttgcagcgccgccatattcaccggatgagtggtttcgaccacgccaatggcccccagtacgcgcacatcggcaaccatttcggcatcacgggcgggggcaagttgctcgcgcagctgtacttcaatatccgccacctgttgctgccagtcgccagattcgagaatcgccaggctggcgtttgctgccgcgcaggccagcggattgcccataaaagttggcccatgcataaagcaaccggcttcaccgttactgatggtttctgcaacctcgcgcgtggtgagtgtggcggaaagggtcattgtgccgccggttaaggctttaccgaggcacaaaatgtccggcgcgatttctgcatgttcacaggcaaacagtttcccggtacgaccaaatccagtggcgatctcgtcggcaatcagcaagataccttcgcgatcgcatattttgcggattcgttttaaccattccggatggtacatgcgcatcccgcctgcgccctggacaatcggctcaatgatcaccgccgcgatttcatgacgatgcgccgccatcaggcgggcaaagcccaccatatcgcgctcatcccattcgccatccatgcggctttgcggggcgggagcaaacaggttttctggcaggtagcctttccacagactgtgcattgagttatccggatcgcacaccgacatcgcgccaaaggtatcgccatgataaccattgcggaaggtcagaaaacgctggcgcgcttcgcctttggcttgccagtactgcaacgccattttcatcgccacttccaccgctacggaaccggagtccgcgagaaaaacgcactccagcggttgcggcgtcatcgccaccagtttgcggcacagctcaatggctggcgcatgggtgataccgccaaacatcacatgcgacatggcatcaatttgcgacttcatcgccgcattaagctgcgggtgattgtagccgtggatcgccgcccaccaggacgacataccgtcaaccaggcgtctgccgtcagacaaaatcagctcgcaaccttcggcgctcaccaccggataaaccggcagaggggaggtcatggatgtgtatgggtgcaggatatggcgttggtcaaaggcaagatcgtccgttgtcataatcgacttgtaaaccaaattgaaaagatttaggtttacaagtctacaccgaattaacaacaaaaaacacgttttggagaagccccatggctcaccgcccacgctggacattgtcgcaagtcacagaattatttgaaaaaccgttgctggatctgctgtttgaagcgcagcaggtgcatcgccagcatttcgatcctcgtcaggtgcaggtcagcacgttgctgtcgattaagaccggagcttgtccggaagattgcaaatactgcccgcaaagctcgcgctacaaaaccgggctggaagccgagcggttgatggaagttgaacaggtgctggagtcggcgcgcaaagcgaaagcggcaggatcgacgcgcttctgtatgggcgcggcgtggaagaatccccacgaacgcgatatgccgtacctggaacaaatggtgcagggggtaaaagcgatggggctggaggcgtgtatgacgctgggcacgttgagtgaatctcaggcgcagcgcctcgcgaacgccgggctggattactacaaccacaacctggacacctcgccggagttttacggcaatatcatcaccacacgcacttatcaggaacgcctcgatacgctggaaaaagtgcgcgatgccgggatcaaagtctgttctggcggcattgtgggcttaggcgaaacggtaaaagatcgcgccggattattgctgcaactggcaaacctgccgacgccgccggaaagcgtgccaatcaacatgctggtgaaggtgaaaggcacgccgcttgccgataacgatgatgtcgatgcctttgattttattcgcaccattgcggtcgcgcggatcatgatgccaacctcttacgtgcgcctttctgccggacgcgagcagatgaacgaacagactcaggcgatgtgctttatggcaggcgcaaactcgattttctacggttgcaaactgctgaccacgccgaatccggaagaagataaagacctgcaactgttccgcaaactggggctaaatccgcagcaaactgccgtgctggcaggggataacgaacaacagcaacgtcttgaacaggcgctgatgaccccggacaccgacgaatattacaacgcggcagcattatgagctggcaggagaaaatcaacgcggcgctcgatgcgcggcgtgctgccgatgccctgcgtcgccgttatccggtggcgcaaggagccggacgctggctggtggcggatgatcgccagtatctgaacttttccagtaacgattatttaggtttaagccatcatccgcaaattatccgtgcctggcagcagggggcggagcaatttggcatcggtagcggcggctccggtcacgtcagcggttatagcgtggtgcatcaggcactggaagaagagctggccgagtggcttggctattcgcgggcactgctgtttatctctggtttcgccgctaatcaggcagttattgccgcgatgatggcgaaagaggaccgtattgctgccgaccggcttagccatgcctcattgctggaagctgccagtttaagcccgtcgcagcttcgccgttttgctcataacgatgtcactcatttggcgcgattgcttgcttccccctgtccggggcagcaaatggtggtgacagaaggcgtgttcagcatggacggcgatagtgcgccactggcggaaatccagcaggtaacgcaacagcacaatggctggttgatggtcgatgatgcccacggcacgggcgttatcggggagcaggggcgcggcagctgctggctgcaaaaggtaaaaccagaattgctggtagtgacttttggcaaaggatttggcgtcagcggggcagcggtgctttgctccagtacggtggcggattatctgctgcaattcgcccgccaccttatctacagcaccagtatgccgcccgctcaggcgcaggcattacgtgcgtcgctggcggtcattcgcagtgatgagggtgatgcacggcgcgaaaaactggcggcactcattacgcgttttcgtgccggagtacaggatttgccgtttacgcttgctgattcatgcagcgccatccagccattgattgtcggtgataacagccgtgcgttacaactggcagaaaaactgcgtcagcaaggctgctgggtcacggcgattcgcccgccaaccgtacccgctggtactgcgcgactgcgcttaacgctaaccgctgcgcatgaaatgcaggatatcgaccgtctgctggaggtgctgcatggcaacggttaataaacaagccattgcagcggcatttggtcgggcagccgcacactatgagcaacatgcagatctacagcgccagagtgctgacgccttactggcaatgcttccacagcgtaaatacacccacgtactggacgcgggttgtggacctggctggatgagccgccactggcgggaacgtcacgcgcaggtgacggccttagatctctcgccgccaatgcttgttcaggcacgccagaaggatgccgcagaccattatctggcgggagatatcgaatccctgccgttagcgactgcgacgttcgatcttgcatggagcaatctcgcagtgcagtggtgcggtaatttatccacggcactccgcgagctgtatcgggtggtgcgccccaaaggcgtggtcgcgtttaccacgctggtgcagggatcgttacccgaactgcatcaggcgtggcaggcggtggacgagcgtccgcatgctaatcgctttttaccgccagatgaaatcgaacagtcgctgaacggcgtgcattatcaacatcatattcagcccatcacgctgtggtttgatgatgcgctcagtgccatgcgttcgctgaaaggcatcggtgccacgcatcttcatgaagggcgcgacccgcgaatattaacgcgttcgcagttgcagcgattgcaactggcctggccgcaacagcaggggcgatatcctctgacgtatcatctttttttgggagtgattgctcgtgagtaaacgttattttgtcaccggaacggataccgaagtggggaaaactgtcgccagttgtgcacttttacaagccgcaaaggcagcaggctaccggacggcaggttataaaccggtcgcctctggcagcgaaaagaccccggaaggtttacgcaatagcgacgcgctggcgttacagcgcaacagcagcctgcagctggattacgcaacagtaaatccttacaccttcgcagaacccacttcgccgcacatcatcagcgcgcaagagggcagaccgatagaatcattggtaatgagcgccggattacgcgcgcttgaacaacaggctgactgggtgttagtggaaggtgctggcggctggtttacgccgctttctgacactttcacttttgcagattgggtaacacaggaacaactgccggtgatactggtagttggtgtgaaactcggctgtattaatcacgcgatgttgactgcacaggtaatacaacacgccggactgactctggcgggttgggtggcgaacgatgttacgcctccgggaaaacgtcacgctgaatatatgaccacgctcacccgcatgattcccgcgccgctgctgggagagatcccctggcttgcagaaaatccagaaaatgcggcaaccggaaagtacataaaccttgccttgttgtagccattctgtatttggttaaattgcgagcgagatcgcgtcttcgattgactgcaatttaaccaattaaattctaaaataatcacgaaaaaaattttacttccgcctcatgcggcgaatgtgggaattgcccaggcggcgggggataggggctggagacagttatccactattcctgtggataaccatgtgtattagagttagaaaacacgaggcaagcgagagaatacgcggcttgcacgcgaattggcgttaaagacggctcaaagaaatatcttttattttttaactggttagataaatgcaatggcagtcactgaacaggcatctcttgccataaaactgtcatcactcatcttgacaaatgttaaaaaagccgttgctttggggataacccggtaaggccggagttttatctcgccacagagtaaattttgctcatgattgacagcggagtttacgctgtatcagaaatattatggtgatgaactgtttttttatccagtataatttgttggcataattaagtacgacgagtaaaattacatacctgcccgcccaactccttcaggtagcgactcatgagtaaaccgttcaaactgaattccgcttttaaaccttctggcgatcagccagaggcgattcgacgtctcgaagaggggctggaagatggcctggcgcaccagacgttacttggcgtgactggctcagggaaaaccttcaccattgccaatgtcattgctgaccttcagcgcccaaccatggtacttgcgcccaacaaaacgctggcggcccagctgtatggcgaaatgaaagagttcttcccggaaaacgcggtggaatatttcgtttcctactacgactactatcagccggaagcctatgtaccgagttccgacactttcattgagaaagatgcctcggttaacgaacatattgagcagatgcgtttgtccgccaccaaagcgatgctggagcggcgtgatgtggttgtggtggcgtctgtttccgcgatttatggtctgggcgatcctgatttatatctcaagatgatgctccatctcacggtcggtatgattatcgatcagcgcgcgattctgcgccgactggcggagctgcaatacgctcgtaatgatcaagcattccagcgtggtactttccgcgttcgtggcgaggtgatagatatcttcccggcagaatcggatgacattgcacttcgcgtggaactgtttgacgaggaagtggaacgattgtcgttatttgacccgctgaccgggcagattgtttccactattccacgttttaccatctacccgaaaacgcactacgtcacaccgcgcgagcgcatcgtacaggcgatggaggagatcaaagaagagctggccgccagacgcaaagtgctgttggaaaacaacaaactgctggaagagcagcggctgacccagcgtacccagtttgatctggagatgatgaacgagctgggctactgttcggggattgaaaactactcgcgcttcctctccggtcgtggaccgggtgagccaccgccgacgctgtttgattacctgcctgccgatgggctgctggtcgtcgatgaatctcacgtcaccattccacaaattggcggcatgtatcgcggtgaccgggcgcgtaaagagacactggtggagtacggcttccgcctgccatcagcgctggataaccgtccgcttaagtttgaagagttcgaagcattagcgccgcaaaccatctatgtttcggcgacgccgggtaattacgagctggaaaaatccggcggcgatgtggtggatcaggtggtgcgtccaaccggattgcttgacccgattatcgaagtgcggccggtggcgacacaggttgatgatcttctttcggagattcgtcagcgagcggcaattaacgaacgcgtactggtcaccacactgaccaagcggatggcggaagatcttaccgaatatctcgaagaacatggcgagcgcgtgcgttatcttcactcagatatcgacaccgtcgaacgtatggagattatccgcgacttgcgtctgggtgagttcgacgtgctggtagggatcaacttactgcgcgaaggtctggatatgccggaagtgtcgctggtggcgatcctcgacgctgacaaagaaggcttcctgcgttccgaacgttcgttgatccagaccattggtcgtgcggcacgtaacgttaacggtaaagcgattctctacggcgataagatcaccccatcaatggcgaaagcgattggcgaaaccgaacgtcgccgtgagaaacagcagaagtacaacgaggaacacggaattacgccgcaaggcttgaacaagaaagtggtcgatatcctggcgctggggcagaacattgccaaaaccaaagcgaagggcagaggaaaatcgcgcccgattgttgagccggataatgtgccgatggatatgtcgcctaaagcgttgcagcagaaaatccatgagctggaagggttgatgatgcaacacgcgcagaatctggagttcgaagaagcggcgcaaattcgtgaccagttgcatcagctgcgtgagctgtttatcgcggcatcgtaacaggatagcgaagaagactgatgacaaacggaaaacagcctgatgcgctacgcttatcaggcctacattttctccgcaatatattgaatttgcgcggtttgtaggccggataaggcgttcacgccgcatccggcataaacaacgcgcactttgtcttcaataggaagccggaattttccttcggatttccgttaacctaaagcctgtaacgccttttccagcgcgttatgtaacaactggcggtcatgacgatacggaatatcgctggcctccagtacctcctggatcacaatccgctctttcaccgccgagacatccacttttggcccgacgatgaccgcatcaatgacctttttaccaacatactgctccataattgccagcttgctttccagcttcaaattagccgcaggtaaactcaactcacgccccagattgccgatataaaccatcggcgctggcgtgcggcgtaatgcctgggcgatttccttcagcagcagaattggcatcaggctggtataaaaactgccaggcccaataatgatgagatccgcttcattgatagcgtgaaccgcctcacgcgttgcgggtacattaggcgttaacaataactcttgaatcggcgtagttaactggtcgatattgacctcgccgtaaacttcatgcccctgatcgtcaatcgccatcagatcaacaggatgctctgacattggaatcaaatgcgtatccactttcagcagattacgaattaaattgatggcttccagaggccgcacgctaaggtgatccagcgcctttaacatcaagtttccgagattatgaccggaaagttcgccattgccaccaaaacggtattcaaacatcgcggaggcgacgctcggttccgttatcagctggttgaggcagttgcgcatatcgccccaggcaatgccgccttctgaacggcgaatacgccccgtcgagccaccattatcggtggtggtgacgatacccgttaaacgagaacccaaagacgaaagtgatgagagaacgcgtcccagtccatgccctccgccgagagcaacgacacgatcaagatcagccagcgtacgattgcgcatatagtttcctggagtcagattatccgcgctacagtagcgcaaattgcggggaaacagcaattaacctgccaatattgaggatacaaactattttcttctacctctaaaggacgatgcacgctatgcctccctgatgatgtatatcaaagtaaaaccgccattttcccttattctgtagcgaaatagcacgatcatgacgctatatacatgattacatagcgaaagtgtggatggtaaaaatctcatttacacgctagtatcggcataaccactaaacactctagcctctgcacctgggtcaactgatacggtgctttggccgtgacaatgctcgtaaagattgccaccagggcgaaggaagaaatgacttcgcctcccgtatctggaaaggtgtacatggcttcacaactgactgatgcatttgcgcgtaagttttactacttgcgcctgtcgattaccgatgtgtgtaactttcgttgcacctactgcctgccggatggctacaaaccgagcggcgtcaccaataaaggctttcttaccgtcgatgaaattcgccgggttacgcgcgccttcgccagactgggcaccgaaaaagtgcgcctgacaggaggagagccgtctttacgccgcgactttaccgatatcatcgccgctgtgcgggaaaacgacgctatccgccagattgcggtcacaaccaatggttaccgtctggaacgcgatgtggcgagctggcgcgatgcgggacttactggcattaacgtcagtgtcgacagtctggacgcccgccagtttcacgctattaccgggcaggataaattcaaccaggtcatggcagggattgatgctgcatttgaggccggttttgagaaggtcaaagtcaataccgtgctgatgcgtgatgttaatcatcaccagctcgacacctttctgaactggatccagcatcgccctatccagctgcgtttcatcgaactgatggaaacgggcgagggcagcgagctcttccgtaagcatcacatctctggtcaggttctgcgtgacgagctactgcgtcgcggctggatccaccaattacgtcaacgcagcgacggtcccgcgcaagtcttttgccatccagattacgccggagagattggccttatcatgccgtatgaaaaagacttctgcgccacttgcaaccgcctgcgcgtttcctccattggtaaactccatctctgcctgtttggtgaaggcggcgttaacctgcgcgatctgctggaagacgatacccagcaacaggcgctggaagcgcgtatttcagcggcgctgcgggagaagaaacagacccatttcctgcatcaaaacaacaccggtattacgcaaaacttatcgtacattggcggctaaaacgtcaaaaggagagatcagatgagtcaggtaagcactgaatttatcccgacccgtattgctattcttacggtttctaatcgtcgcggtgaagaagacgatacctccggtcactatctgcgcgattcggcgcaagaagcgggccatcacgttgtcgataaagccattgtgaaagaaaaccgctacgctattcgcgctcaggtatctgcgtggatcgccagcgacgatgtacaagtggtattgattacgggtggtactggcctgacggaaggtgatcaggctcccgaagcattgctgccgttgttcgaccgtgaagttgaaggttttggtgaagtgttccggatgttgtcgtttgaagagattggcacttccacgttgcaatctcgtgcggtagcgggcgtcgccaacaaaacgctgattttcgccatgccgggttcgaccaaagcgtgccgtaccgcatgggaaaatatcatcgcgccgcagctggatgcccgtacgcgtccgtgtaatttccatccacatttgaagaaataagtatgtcgcaactgacccatatcaacgccgctggcgaagcgcacatggtggatgtctccgccaaagcggaaaccgtgcgtgaagcgcgggcggaagcctttgtcaccatgcgcagcgagacgctggcgatgattattgatggtcgccaccacaaaggcgacgtatttgccactgcgcgtattgccggtattcaggcggcaaaacgcacctgggatctgatcccgctctgtcatccgctgatgctcagcaaagttgaagtcaatttacaggccgagccggagcacaatcgggtgcgtatagaaaccttatgccgcctgaccgggaaaaccggtgtcgaaatggaagcattaaccgcggcctccgtggcggcgctgaccatttatgacatgtgcaaagcggtgcaaaaagatatggtgattggtccggtacgtttgctggcgaagagcggcggcaagtcgggtgactttaaggtggaagcggatgattaaagttctttttttcgcccaggtgcgcgagttggtgggaacagatgcaaccgaagtggctgcggatttcccaactgttgaagcgttacgccagcacatggctgcgcagagcgatcgctgggcgctggcgctggaagatggcaaattactggctgccgtcaaccagacgctggtgagttttgaccatccgctgactgacggcgacgaagtagctttcttcccgccggtaaccggaggttaagatggcagaaaccaaaattgttgttggtccgcagccgttcagcgtaggagaagagtacccgtggctggcggagcgtgacgaagacggtgcggtagtcacctttactggtaaggtgcgcaaccataacctgggcgacagcgtcaacgcattaaccctcgaacactatccggggatgactgaaaaagcactggcagaaattgttgatgaagcgcgtaaccgctggccgctggggcgcgtcactgtgattcaccgcatcggggaattatggccgggcgatgaaatcgtttttgtcggtgtcaccagtgcgcatcgcagcagtgcgtttgaagccgggcagtttattatggattatctcaaaacccgcgcaccgttctggaagcgcgaagccacgccggaaggcgaccgctgggttgaagctcgggagagcgatcagcaggcggcaaaacgctggtagttttttgttagccggataaggcaccgctgcgtccggcaatttcaccgctcagtacatacgtttacgctgcgtcgatgcacagcctcatcattttgcagtatccttaagatattccttatatcttcaggagatcgtcatggacagattcccacgttctgattcaatcgtacaaccccgggctggcttgcaaacttatatggctcaagtctatggctggatgaccgttggcttgttgctgaccgcatttgttgcctggtatgcggctaattccgcggccgtgatggagctgttgttcactaaccgtgtctttttaatcggtctgatcatcgcgcaattagcattggttattgtgttatcagcgatgattcaaaagctgagcgcaggtgtaacgacgatgctctttatgctttattcggcgctgacgggtcttacgctttccagtatattcattgtctataccgctgcttctatcgccagtactttcgtcgttactgccgggatgttcggcgcaatgagcctgtacggttacaccacgaagcgcgatttaagtggctttggcaatatgctgtttatggcgttaatcggcattgtgctggcatcgctggtcaacttctggttgaaaagcgaagcattgatgtgggcagttacctacatcggcgtgattgtctttgtcggattgacggcgtatgacacgcagaaactgaaaaatatgggtgagcagattgatacccgcgacacgtcgaacctgcgcaaatattccattcttggcgcgttaaccttgtatctggacttcatcaacctgttcctgatgttgttgcggatcttcggcaaccgccgttaattctttttcaccatcactatcccggccatgtgtcgggatttttttcttactaaaaacgacacttaacaagtaccaggtataaaatatgccttatggacgagcggaagcgttttctgtatccataaatgcaaaagtattttgtatgcgtggttttaaatttattgatggtgaatattaatattttttctaaggataactaaaagaatggaatcatactcgcaaaacagcaataaattagattttcagcacgaggccaggatattaaacggtatatggctcattaccgctttaggtttggtggcaaccgcaggactagcctggggagctaagtatatcgaaattacggcaaccaaatatgattcaccaccaatgtatgtcgccatagggttattattactttgtatgtatggcttaagtaaggatatcaacaagataaatgccgccatcgcgggcgtaatatatctgtttttactctctttggtggcgattgtcgttgcaagtttagttcctgtatatgccattatcatcgtgttcagcactgcgggcgcgatgtttttaatcagtatgctggccggtttattatttaatgttgatcctggttctcaccgttttatcattatgatgacgttgacagggttggccctggtaatcatcgtgaatgcggcattaatgagtgaacggcccatttggataataagttgcttaatgattgtgttatggtcaggcattatctcgcatggacgaaataagctccttgaattggcggggaaatgccatagtgaagagttgtggagtccggttcgttgcgcttttacaggtgcattaacactctattactattttatcggcttctttgggatacttgccgcgatagctataacgcttgtctggcaaaggcatacgcgtttttttcattagccgtaaatgcacatactaaagaacttaactaaacttcacatcgccgcttcatttttcgcccgtagcttcttcgcctggctttccagcaacaggtaacagatcagcgccagcagcagtgggataaagtaatacagcacacggtaagcgagtagggcggcgataattgtacctttggaggtatgctccccagccagtagtgcgataaacaccgcttccagcacaccgatccccgccggaatatgcacgatgacgccagcaatactactaaccagtaacacgcccagtacaaagaaatagttcacgctttgaccaagtaacagccagataatcgcccccattaccatccagttaacgctggaaatcagcatctgagcgagggcgaatttccatgaaggcagcaccagcttttgccctttgatggtcatatggcggtgcttcgcgaaagcgcaaaaccacaaataaaccgcgataatcatcagtaagccaatgccgagaatacgcagcgtagtttgatcgacataccagtgatccggcaactccaccacgcctgcggtaaagataatccctgccagtaaaatgtagcccagccagttggtggtaatactgagcgagaaaatccgcgtaatagtgctaccgggcaaccccagacgagagtacaaacgatagcgcataccaatgccgccgacccaggtactgagcgtcaggttgaaggcgtagcagataaacgacaccagcatcacctggcgcttcgccagtttgtgaccgcagtaaaagcgggcgagcaggtcatagcagccgtaaatcagatagctgacgaccaccagcccgaccgcactaagcagcgcaacgcgattgtagtcgcggatgaccttccagacctcttcccagtccacttttttggcgtagaccaccagcaacacaatcaccgcgataaaaaacagccaggtgaggatcttctttgctaagcgccagcgcgggtgtgatttactcatcagggttttacccccgtgttttcagtttctacccgatcctgcgtttccattgtcggttgtgcgggcggatcaacctgcgccagacgtggcgtgtgtgccggaagccagccaaccagcgccgggaagtggcgtaaaaagtggaacgccagcacgcttttggtcaggttccaccaggtgcgtttgggcagcatggtttcatccacctgctgacaatctgcggcaataatgccgttcagattatcgcgcagcgtctggttaaaatgacgatcgtggatgatgacatttgcttcgagattcagtgacaaactgagcggatcgagattactggaccctactgtcgcccagtgatcgtccatcaatgccactttgccgtggagcgggcggcggcggtactcaaaaacctgaacgccgcctttaaccagatagttatacagcaagcgcgcaccgactctgacaatcggcatatccggttcgccctgaatgatcagtttgatccgcaccccgcgccgtgccgctttacgcaaggcgtgtaaaaatcgatagccggggaagaagtaggcgttggcgataatcacttcccgccgcgcctgagtgagcattttcaaataatggcgttcaatatcatcgcgatgttcttcgttatcgcgccagaccagcaatacctgcgcttctcccggctggcggttctcttccgctttgtgatgacgtcgccaccagcgtcgtgccgcgctctgtccaggcaggttttccagctcaaactggagaatatcttcgacaatcggcccttcaaggcgtaccgcgtaatcctgtttagcctctggaccgtagctggacatatgctcggcggagtaattcagcccgccaataaaggctatacgcgcgtcgatcaccacaattttgcgatgcatccggcgaaacacattggtgcgcataccaaaaaggcgagggcggggatcgtagtagcggaacactacgccagctgccgtcagttcattgacaaactcatcgctgagatccggcgaaccgtagccatccagcaagacttccgctttaaccccgcgttgcgctgctgccagtagtgccgcatgcagttgtttgccgacgtcatcctcaaaccagataaacgtttcaagaatgatgcgttcttgtgcctcgccaatcgccttaaacaccgcgggataatattgctcgccgttttccagcaactggatcttattgccttcgcgccagctacatttcataaatgaatctccgcacttaaaggggcatgatcagaaaggtgtcgccatgtccgcagcggcaacgcggttggcgcgctggcgctggcatttttgacgtagatcctgtccagtcgtagtagaggaaattgcaccggaaacgtgcgcgccgggcgtccgtgggcgcgggtaaaaatctcatccagtccggcctgcacttttaacggatgattagctttttgccgccagtcattgaaatcacccgccaccaataccggttcgccgtccggtagctcattcacccattcggcgagcatcgcaagctgcgcctgacggtgcgcctcacgcaggcccagatgtacgcacatcacatgaatcgcttttccggtcatcggcggcacaatgcggcagtagagcacgccgcgcttttccgcaccatcgaccgaaacatcgcgattctcataatgttcaatgggataacgcgacagtacggcgttgccgtgatgcccttccgggtatacggcattgcgaccgtaggcaaaatcgctccacatagtgtcggcgagaaactcgtagtgcgaggtatcgggccagttttccacatgcagcggatgaacttcgtgcgcgcccatcacttcctgcaggcaaacaatatcggcgctgacggtacgcacggcgtcgcgaagttccggcaaaatgaagcgtcggttaaacgcggtaaagcctttgtgaatattgatggtgagcaccttgaacgaaaattgttgtgtttgatcgggcataattttcctgtctttgcctcttatctcattgaaatagtgtagtcggcgtcacaaaaaggtgcggtcttacggaattttccgtaaagttcggtactctgagtaagtagagataaattcttcaggagagaagccatgaagtggcaacaacgtgttcgtgtcgcaacgggtctaagttgctggcagattatgttgcatttactggtagtggcgctgctggtggtgggctggatgagtaagactctggttcacgtcggcgtgggattatgcgcactgtattgtgtcacggtagtgatgatgctggtgtttcagcgccaccccgagcaacgctggcgtgaggtggcagacgtgctggaagagctgaccacgacctggtattttggcgcagcgctgattgtgctgtggctgttgtcccgcgttctggaaaacaactttttgctggcaattgcagggctggcaatccttgccggcccggcggtagtgtctttgctggcgaaagataagaagttacatcaccttacgtctaaacatcgcgtacgccgctgaccctgtcgtggccgttatcaccagtagcggccacaaactattccacacaatatccagactcgcatccttcaaataaatctgcttggtaatgtccgtaaagtggcgaatagggttaatccacgtcaggttttgcagccataccggcatgttttccaccggagaaacgtaaccggaaaggagaatggcgggcatcataaagacaaacacgccgataaacgcctgctgttgtgttgaacagagtgatgaaatcaacagaccgaatcccaccagcgataaaccataaatcaccatcgtaaagtagaacagcgccagcgatccggcgaaggggatttgatacgcccagataccaatcgccagcacaatggtggcctggaaggtggcgacaattaacgccggtacggctttgccgatgaagatctgccaggtggtgagcggcgaaaccagtagctgatcgagcgtaccttgttcacgttcgcgggcgacggaaagtgaagtgacgatcattacgccgatagtggtgatcatggcgatcagtgacggcaccacaaaccatttgtagtcgagattcgggttataccagttgcgtaccaccagctcgctgttgttaggtttcggttttccttccagcagctcctgctgataatttttgacgatctgttgcaggtagttggcggcaatttgcgcactgttggagttacgcccgtcgaggatcaactgcaaaggcgcggtctggaaggtatccagtttgcgcgagaagtcagccgggaaacgcaccagtagtaacgccttttgtgtgtcgatggttgggcggatctcctgtgggcttttcagcagcagcacatgagtaaaggcgctggcgcgggcaaaacgttgggtcagctccaccgaatgctcgccgttatcttcatcgtagatggcgatggtggcgttagtcacttccagcgtggcggcgaacgggaacaggatcacctgaattagcacgggtaaaatcagaatcgcgcgggtttgcggttcgcgcagcaacgactgcaactctttgcggattaacgtccataagcgatgaaacatgctcttctccctaatccagccgacgtttggttttcagccacgtcaggccgataaacatcaccgccgaagcgatcaaaaacagcacgtttaccaccagcaccactggaatattcccggcgaggaacaggctttgcagggtgctgacgaaataacgagcgggaataatgtacgtcaccgcgcggatcaccgcgggcatactgtcgatctgaaaaataaagccggaaagcataatcgacggcagaaaagcggcgttcagggcgacctgagcggcattgaactggttgcgggtaatcgtggaaatcagcagccccatccccagggtactgagtaaaaacaggctggagataaaaaacagaatcagcagcgacccgcgatacggcacgccgagaataaacactgacaccagcatacacagcaacatcgccagcatcccgagaaagtaataagggatcagcttacacagcagcagttccgtgcgggtaatctccgtagagagcagagcctccatggtgccgcgttcccattctcgcgccaccaccagcgaggtgagaatcgcgccgatgaccgtcatgataatggtcaccgcaccggggataatgaagtgctggctaatcgccgccgggttaaaccagtagcgggtttgtacatcaataagcggttcaaaagtctgcccgttgtcctccgctcgctgcatttgccagatctgccagatcccttcgacatacccctgtacaaagttagcggtattcggctcactgccgtcggtgatcacctgaatcggtgcggtggcgttggcgcgctccatctgttccgcaaaatccaccggaataaccaccagaccgcgaattttccccgcctgcattttggcgatcagttcctgacggttatcgctgatggtggcgtcgatgtagggcgaaccggtcatggtgtgggtgaaatccagcgccgcttcgctacgctgttccagtaaaatcccgacccgcagcttgctggagtcgaggttaatgccgtaaccaaaaataaacagcagtagcagcgggatcactaccgcaatcagccagctactcggatcgcgaacgatctgccgcgtctctttaacgcacagcgcccgtacgcgacgccaggacaggatcgggttactcattgctatgctccttatcccagtcgtggatcaactgaataaaggcttgctccatggtgggatcgggttgctcatcgttagccgactgtgctttcaaatcgtccggcgtgccgctggcgattaatttcccgcggtacaccaggccgatgcggtcgcaatattccgcttcatccataaagtgggtggtgaccatcaccgtgacgcctttctctaccatgctgttgatgtgcagccaaaattcacggcgggtgagggggtcaacgccggaagtcggttcgtcgagaaacagaatgtccggttcatgcatcagcgaacaggccagcgccagccgctgtttaaaacctaatggcagttcatcggtggcgtgggaggcgatacttttcaggccgaacgcctcgctcatgcgggagattttttcgttctgcgcccgaccgcgtaagccatacacaccagagaaaaagcgtaaattctgttcgaccgtcaggttaccgtagagcgaaaatttttgcgccatatagccgagatgctggcgcgctttaccggaactctctttcagatccatccccagcaccagcgcctggccggaagtcggcaccagcaaaccgcacatcatcttaaaggtggtcgatttacccgcgccgtttggccccagcaaaccaaaaatctccccacgtttaacggcaaagttgacgtgatcggtggcggcaaaatccccaaatttcttggtcagttctttcgcttcgatcaccgtctcgccgggtgtgccttctaccgtatgtaatattgcgcccagcggcgattccgaggttccggcaccgcccagcaaatcaataaacgcatcttcaaaacgcggcgtagtttcgttgatgttgatttccggcatcccgtcggcatggcgaatatcgtctggtgtggcctcttttttgaggatcagacgtaccgatttcccctgaatcatgccgtcgctgacctgcggcagtttcaaggcgcgttgcaacagtttgcggttgccctcgtgtggactggtcatcagaaagctgcgtccggccatggtttgtgtcagggcttttggttctccctgatacagcaactcgccttcgttcatcagtaacacgtcacggcactgctcggcttcgtcgagatacgaggtactccagaggattaacatcccttcgcccgccagctcatgcaccatctgccacagttcgcgccgtgagatagggtcaacgccgacgccgggttcatcgagcagcaacactttcggttcgcccaccagggtacaggccagaccgagtttttgtttcatcccaccggagagcttgcccgccaggcgtccggtaaacggcccaagagacgtaaactccagcaggcgagcaaaagtttgcttacgtgcctcgccggtgacgctgcgcaaatccgcgtacagattgaggttctccatcaccgtgagatcttcatacagaccaaatttctgcggcatataaccgagcacggcgtgcagcgcgccgtcgtttttgatcggatcaaagccaatcaccgtggcactgccgctgtcgggtttcagtaatcccgccaacatccgcatcagcgtggttttacctgcaccgtccggccccaccaaccccgtcacataaccggcgtgaatggtacaatcgagcggcgcgacggcgggcttgtccatgcccggaaagcgtttttccaggccgttcagcgtgataacggcatcattcatgtcctgcctcgtcaccgaattgtaccgtcactggcattccctggcgtaacgcatcatcggcgtcggtcaccacaatacgcaggcgatagacgaggtcggtacgcagatccggcgtttcgacggttttcggggtaaattcagcagtcggcgaaacgaaaccaatctgcccgtgatacggcttgtccgggcgaccatcggtataaagcagcactttgcgccccggctgggcctggtcaagattacgttcatcaacataagcgcgcacccacaccggacgcgttagtgaaacggtaaacaccgtgccaccttcattgaggaccgtgcctggctccaccgcgcgcgttaacagcgtgccatcagacggggctatcaacgttgagtcctgtaaattcaactccgcctgcgccagttgcgcctgcgcctgttcgaggctggctttcgcctgagcgatgtcctgttcacggttaccggaacggtactgacgcaatttatcctgtgctgatttcagcgttgcctgcgcctggtcgcgcgaggagcgggcattttccaggtcatttgccgaaatagtgcggcttttccacaacccttgctggcggttatagaagttctgcgcatagtcataggcggcttgcgcctgtttcaccgctgcggcggcctgagcgatttcttcattgcgatacccggcaagcatcaggtcatactgcgcctgtgccaccgaaacacccgctttcgcctgcatcagggcaatctcatacggcttgtgatccagttcgcccagcacctggcccgctttgatagcatcaccttcgtccaccgccagcgattcaacgcgccccccaacacggaaactaagatttaccgtacgaatatccacgttgccatacagcgtcaggccgttatcctggcggctttgataccaccagtagcctccggcaaccacggcggcaagtaccactaccgccaatccgatcacgacaggttttttcatcactacaaactcctttgcgataatccttgcaaaatcaggtcgatatgacaggtcaccgtctggttgatcagttcggtcttttcttcatcgaacgcggtccagccggtacgtaacagaattgtttctttgccaagacggaacgccagaatctcaccaatcaacgcatgggtatgaaggatcatgcgggtgtcattggcgtcgcagccggtccaggcggcaatcaggcgtgtcaggtggctgtgtagcggactaatcacctgttcgtgcaccaggtggtaggctgccgtgggagagagctgctcacgggagataaacttgctgaggttgacggtgtcatcctgggtgagcagcttaatcatgttcctgcaggcgcgaaggatcagttcacggatggcagcccgatcaggctgtggttgcgcgaacaagcgttcggcttcctcggcatgcggacggaactgctcgccaataaaatcggcaatccactgggcgcaggcgaggtacaaatcttctttcgaaccgaagtagtaggtgatggcagcgatattctgcccggcctgggcggctatctcgcgagtggtggcgttcattccatattcaccaaactgcgccagtgcggcagcaatcagctgttttttcgcctgttcacccttgattgtcatggcaggattattcatcgcacagtccattcttaatcaaatgattgattaagattatgactccataggggagttgtccagtatggctaagaattttagcaacgccagtcacagggataatttatgcgctgcgtcacaaaaactgctacactccgctccctcatgacattgtggtttttgtcattttccttttcagtatctccctgaaaactacaccggtaacggtcggggcggttcggagtagttatgtctttcgattctttgggtttaagccctgatatcctgcgcgccgttgccgagcagggttaccgtgaacccacccctattcagcagcaggcgatccctgcggtgctggaaggccgcgacctgatggctagcgcccagaccggcaccggcaaaacagcgggctttacgctgccgctgttgcaacacctgatcactcgccagccgcacgccaaagggcgtcgtccggtacgtgcgctcattcttaccccgacccgtgaactggcggcgcagattggcgaaaacgtccgtgattacagcaaatacctgaacattcgttcgctggtggtgtttggtggtgtgagtattaacccgcagatgatgaaactgcgtggcggcgttgatgtgctggtggcaaccccgggacgtttgctggacctggaacatcagaatgcagtgaagctggatcaggttgaaatcctcgtcctcgatgaagctgaccgcatgctcgacatgggctttatccacgatatccgtcgcgtgttaacaaaactacctgcgaagcgccagaacctgttattctccgcgaccttctctgacgatattaaagccctggcggaaaaactgttgcacaacccgctggaaatcgaagtggcacgccgcaataccgcgtctgatcaggtgacccagcacgttcactttgtcgataagaaacgcaaacgcgaattgctgtcgcacatgattgggaaagggaactggcagcaggtgctggtgtttacccgtaccaaacacggcgctaaccatctggctgaacagctcaataaagatggcatccgtagtgcggcgatccacggcaataaatcgcaaggtgcgcgtactcgtgcgctggctgattttaaatcgggcgatattcgtgtactggtggcaactgacatcgctgcgcgcggcctggatattgaagagctgccgcacgtcgtcaactatgaactgccaaacgtacctgaagattatgtccaccgtatcgggcgtaccggtcgtgcggctgctaccggtgaagcgttgtcgctggtgtgtgttgatgaacacaaactgctgcgtgatatcgaaaaactgctgaaaaaagagatcccgcgcattgcgattccgggctatgagccggacccgtcaatcaaagccgaaccgatccagaacggtcgccagcaacgtggcggcggcggtcgtgggcaaggtggtggtcgcggtcaacagcaaccacgccgtggggaaggtggcgcaaaatctgcaagcgcgaaacctgcagaaaaaccgtctcgccgcctcggcgatgccaaaccggcaggcgaacaacaacgtcgccgccgtccgcgtaaacctgccgctgcgcagtaatcttttatgccgggctatgcccggcatcaggctgatgaacaaacgcaaaactgcctgatgcgctacgcttatcaggcctacgtgaactctgcaatatattgaatttgcatgcttttgtaggccggataaggcgtttacgccgcatccggcatttcacaacaagcacttgtcagcaatttgagaacacgggaaaaaatttatctgttttaccgcccataagccaccgagacgttacttctctatagccaattgttcgcgcaactccattaaaaggtagcccagtcgattcttgcccttaccatgaccaccgtctccccagtaagcatcgttttccgtatgctcaaccagttttgcgggcgcggttgccagcaagagcgcacgcagttctgcatgctgttcgaatttagcgcgaagtgcttttcgcatcacctgttctttgaccgactcccagtttttacgcagaggcttagaacgatcgcgccccatgcgtgcggcgaccataggggaagaaacccgacggatctcttcgcggtatttttcatcaaggaatttttgtgcctgaaaatagtgttctgaggtaggccaggttttcccgtcaaccttgatgggccaggcggcaaagttagaaaaatcaccgtagtcatcgctggtgctgtagaaatttatgatggtgtcttgcatgacgtgttggatcctttgtgctcgaacgggcattaaaccgcattatgttggtggttattgcgagccgctttccagaaacagaaaaaccattacccctgaaaaccgaaaaatgccacaatattggctgtttatacagtatttcaggttttctcatggcattaaccgccgcgcttaaagcgcaaattgccgcctggtataaggcgcttcaggaacagatccccgactttattccccgtgcgccgcagcggcagatgattgcggacgtcgccaaaacgctggccggagaagaagggcgacatctggcgattgaagcccccaccggcgttgggaaaacgctctcttatttgattcccggcatcgccattgcccgcgaagagcaaaaaacgctggtggtgagtaccgccaacgtggcattgcaggatcagatttacagcaaagatttaccgctgctgaaaaagatcattcccgatcttaaattcactgccgcttttgggcgtgggcgctacgtttgtccgcgtaatctgacggcgctcgccagtactgaacccacgcaacaggatctgctggcgtttcttgacgacgaactgacgccgaacaatcaggaagagcaaaaacgttgtgcgaagctgaagggcgatctcgatacttataaatgggatggtctgcgcgatcatactgatatcgctatagatgacgatctctggcgtcgtttaagtaccgacaaagccagctgcctcaaccgcaattgttactactatcgtgaatgcccgttttttgtcgctcgtcgggagattcaggaagcggaagtggtggtggcaaaccatgcgctggtgatggcggcgatggaaagcgaagcggtattgcctgacccgaaaaatttactgctggtgctggacgaaggccatcacctgccggatgtggcgcgggatgcgcttgagatgagcgccgaaatcaccgcgccgtggtatcggctacagctggacttgttcacgaaactggtcgctacctgcatggagcagtttcgcccgaagaccatcccaccgctggcgatccctgaacgtttgaatgcgcattgtgaagagttgtatgagcttatcgcctcgttaaacaacattctcaatctctacatgcctgccgggcaggaggcagagcaccgttttgcgatgggcgaactgccagatgaagtgctggagatctgccagcggctggcaaaactcaccgagatgctgcgtggcctggcggagttatttcttaacgatttaagtgagaaaaccggcagccatgacattgtacgtctgcatcggttgattttgcagatgaaccgcgcgttggggatgttcgaggcgcaaagcaaactctggcggctggcttcgctggcgcaatcttccggtgcaccggtgaccaaatgggcgacgcgggaagagcgcgaagggcagctacacctctggtttcactgcgtgggaatacgtgtcagcgatcagctggaaaggctgctgtggcgcagtattccgcacattattgtcacctccgcaaccttgcgttcgctgaacagtttttcgcgtttgcaggagatgagtggtctgaaagagaaagcgggcgaccgttttgtggcgctggattccccctttaaccactgcgaacagggcaaaattgttattccccggatgcgcgttgagccttccatcgacaacgaagagcagcatattgccgaaatggcggcctttttccgtaagcaggtggagagcaaaaaacatctcggtatgttggtactgtttgccagcggacgggcgatgcagcgctttctcgactatgtgacggatttacgtctgatgttgctggttcagggcgatcagccgcgttaccgtttagttgaactgcaccgcaaacgcgtcgccaacggtgagcgcagcgtgctggtgggcttacagtcatttgccgaagggcttgatttgaaaggtgatctgctcagccaggtgcatatccacaaaatcgcttttccgcccatcgacagcccggtggtgatcaccgaaggggaatggctgaaaagcctcaaccgctatccgtttgaggtgcaaagcctgccgagcgcctcgtttaacctgattcagcaggttgggcgactgattcgaagccacggttgctggggcgaagtggttatctacgacaaacgcttgctgaccaaaaattatggcaagcgactactggatgcattaccggtatttccgatagagcaaccggaagtccctgaaggtatagttaaaaagaaagaaaaaacgaaatccccacgccgtcggcggcgttaatgatgtgagtcaggtaaggagtcgtaaatggactatcgcaaaatcattaaagagatcgggcgcgggaaaaaccacgcgcgcgatttagaccgggatactgcgcgcggtctgtatgctcatatgctcaatggtgaagtccctgaccttgagttgggcggcgtattgattgcgctgcgtatcaaaggagaaggggaagcagagatgctcggcttttacgaagccatgcaaaatcacaccatcaagctgacgccgccagcaggcaagccgatgccgattgtcatccccagttacaacggcgcgcgtaaacaggccaacctgacgccgttgttggcgattctcctgcacaaactcggttttcctgtggtggttcacggggttagcgaagatccaacccgcgtgctgactgaaaccatttttgaattgatgggtattacgccaacgttgcacggcgggcaggcgcaggcgaagctcgacgaacatcaaccggtgtttatgccagtcggcgcgttttgcccgccgctggaaaaacaactggcgatgcgctggcggatgggcgtgcgtaacagtgcacataccctggcgaaactggcgacgccatttgccgaaggtgaggcgctgcgtctttccagcgtttcgcatccggaatacattggacgcgtcgcgaagttctttagcgatatcggcgggcgggcgctactaatgcatggtactgaaggtgaagtgtatgctaatccgcagcgctgcccgcagatcaatctcattgaccgtgaagggatgcgggtgctgtatgaaaaacaggacactgctggtagcgagttactgccacaagcaaaagatccggaaaccacggcgcagtggattgagcgttgccttgctggcagcgaaccgattcccgaatcgctgaaaatccagatggcttgctgcctggtggctacgggtgaagcggcaactatcagcgacggcctggcgcgcgttaatcaggcattttaattcttttctcagccggatgagccatgtcatccggcttttaccccaccgcaatatgaaattcctgcatctttattgaccttcccacgcccggcgtgcagcataaaaatacaacaaacacataacataaacaggagttaaccatggaaagtggtcatcgctttgatgctcagacgctgcacagttttattcaggctgtatttcgtcagatgggtagcgaggaacaagaagcgaaattagttgccgatcatttaatcgcggcaaacctggcagggcatgattcacatggtattggcatgatcccaagctatgtacgctcctggagtcaggggcacctgcaaattaaccatcatgccaaaaccgttaaagaggcgggggcggcggtcacgctcgatggcgatcgcgcatttggtcaggtcgcggcacatgaagcgatggcgctggggattgagaaagcgcatcagcacggtattgccgccgtggcgctacataactcgcatcatatcggccgtatcggttactgggcggagcagtgtgcagcggcggggtttgtctctatccactttgttagcgtggtcggtattccaatggtcgcgccgttccacggtcgcgacagccgctttggcaccaatccgttctgtgtggttttccctcgtaaagataatttcccgctgttgcttgattacgccaccagcgccattgcatttggcaaaacccgcgtcgcctggcataaaggcgtccccgtgccgccaggttgcctgattgacgttaacggcgtgccgacgaccaatccggcggtaatgcaggagtcgccgttgggttcgctgttgacctttgccgaacataaaggctacgcccttgcagcgatgtgtgaaattcttggcggggcgctttccggcggtaaaacgacgcatcaggaaacgttacaaaccagtcccgatgccattcttaactgcatgaccactatcatcatcaacccggaactcttcggcgcgccggattgtaacgcgcagaccgaagcctttgccgagtgggtgaaagcctcgccgcatgatgatgataagccgattttgctaccgggcgagtgggaagtgaacacgcgtcgcgaacggcagaagcaggggattccactggatgcgggaagctggcaggccatttgtgatgcagcgcggcagattggtatgccggaagagacgttgcaggctttctgtcagcagttagccagctaaaaaaaagcccgtccagtggcggacgggcaaacaagggtaacataggatcaatgagggttagagcatatgcgtctgtcggcaaacagacagggaaatacttgtgctggacgtagcgtaaacgcctgatccgtccaacggttcggattttgtaggcctgataagacgcggtagcgtcgcatcaggcatctgttgccggatgcggcgtaaacgccttatccgtcctacgaattacttataaattaccgcagtaccgcttaatttattgttgttggtggcggaagtgatgctgtatccactggcaccggctgccgcggctttctcagccagtttcgcttccagggcatcgagggtggatgcgccatcggcagaaaccacgccgattttattcatgttctgtgcctgggatgccgttaccggttccgccgcgaacacgccaaatgacagagttgaaagagccatagcagcaacaacagtattgatagttttcataattaatctctcgcaggtgatttttgtataagtgacgttgtttcgtcgatgtgatgagtatcacgtttttttacgagagataaaatcgaagagaattgaccgccttgttcaaataaattgattgatatctaacctactgataaaccatttatttgttgtacttatgaacttgttttataccgcgtggcagtcacagcagcgttaaaggcacggaatgacacgcaaaatacaaattatactcgctatgcatctcgccagttgtagttaacgtaactggctgtctttcgaacctctgcgattatatcctgtataagctggtttttgtaaatctttctcctgctgacaatgaatacataagcgcacgccaggaatggcttcccgacgggcctgcgggatgggggcaccgcactcttcacattcatccaggctttcgccgcgcggaatttcaccccgagcgcgggcaatcgcatcttcaattgtactgttgatctgttcgttgacggcgtcatcgttagcccaaccggatgccatatcgacctccccatatcaatacttgtacagttaagtgtagctaatccagggacgaactcgggcagttcaagcatcagatctccgaccattcccgcagcagattatgataaagattaagcagcgacaggatctcttcactttcgccgtagcggcttttcagcgactgaatattgttgtccagttcaaacagcatggcgcgctttttatcatcgcggatcatcgactggatccacataaatgatgccactcgtacgccgcgggttacgggtgtcacgcaatgcaggctgctggagggatacaacacgagatcgcctgccgggagttttacccgatgttgtccgaaggtgtcattaacgaccagttcgccgccgtcgtagctttgtggatcgcttaaaaacagcgtggcagaaaggtcagtacgcatccagccgttttgtggatggctgcgtactgcgccatccacatggaaaccataggtttcattgttctgatagcgattaaacagcggcgtggaaagggtacgcggcaaggccgcggcaaagaataaagcatgttggttaaccgcgttcagcacctcattttgcagggcggcgtataacgtgctgcgggtgtcgacctgttgattgttcttaacttgcgcaccttgtgcgccggtggtgacgcgtccatccacccattcggcttgttccagttgttcgcgaaaacgagcgacgtcctgtggcgataacacgccgggaatgtggtacatcatacaatttctccaaaaagtggggcctgcgccccacatctgaatcagaaatgcatattggctgtgagcaagaaggttcttggctcgcccgggtgataacggtagccgctcttgttgattgaggcgacgtaatcggtatcaaacaggttgtaaacgtttagctggaagtcgagattgcgattaactcgataccccagtttggcatcggcgacccagtaaccttcggtaaacgctggcgttcccaccgcgccgtctgaacctttatgcatactgccgatatagcgtgcgcccgcgccaacagagatatcgtcggttgcctgatattggctccataaggtgaaggcgtgctccggggtatacggcagcgatgaggaaccatcctgggcaacatctttgccgtttttgatggttgctttttgctgggtatagccgccaatcacctgccacgcgggagtgatattcccggccacggatatctcatagccttcgacgcgtttcttaccgtattgcgagtaagttccgtcatcattttgctcaacttcattttcgatatcagtgcggaacagcgcggcggtgagcaacagacgtttatccagaacctgccatttggtgccaatctcgctggtgttggctttttgcggtttaaaatcggtgcggttggcactgttaccgctgccagactgcgcaagggcgaagttgttgccgcccggaggctgctgggaaacggcatagttaatatagacattgccgttttccgtcaggtgatacagcgccccggctttccagttcatcagattgcccgacttggcggtgtcgacggtggtgaccggagaaccttttgccacaccagttgggcaggtgatggcaccgcgtccgctgccgccgcaggcggtggcactgtcatattcagtatgataattatccagacggatcccgccgttcagctcaaaatcacgggtgatttgcagcgtatcaaaggcgtaaattgcgaaggtatccgtctgaccattggcgtttgcgccgttgcgcgtcaggccgccgggatgaatgctgctgtcaggatgataaatatttaccgcgggtaacgtcaccggattaacgccgtagttagtctgcgtttcacgggtaaattccacgccggtactgacatcatgaccgatagaaccggtatagaacgtcgaggtcaggttggtctggttggtgagaattttattactcacatctttggtattcgccgtgcgtgaccaggtccagctattcacatcgctggtgggctgagtaatattcgacgccccgcccataatcgccgtcatcaggtaatcctgctttacgcgcgaccaacgggtagtattgcgaatggtggtgttatcgttgatgtcgtgctcaaaacgcatggtggcggtgtcggtggtcgaatcgtcgtaatcggaatccgtgccgtaaaagttatgagtatcaacttttccggaatgattcagggccgccgttcccgcagatggggcagaatagcccggcaaaccgatggtcggaatgccgccgtctggcgtgttgtgctgggtgacatgcagataattaagatacaaacgattcgctgtaccaaggccaaaagcgacagaaggggcgacgccgtaacgctcatttttgactttgtcgcgtccggcatcgtgcgttttttcgcccattacattcaggcgcaccgcggtggtatcaccaatgacctgattgacgtccagcgtgccgcggcggaaccaggcgctgccaatactggcggaggcgtcaatgccggaatcattgcgcggctgcttgctgatcatattgatcgagcctgtcggtgcgctgcgcccgtagtcggtgccggacggccctttaatcacttcgacctgctcggtattgaaggtgtcgcgcgagacgctgccgatatcgcgaatgccatcaatataaatactgttagaggtatcggcaccacgcatataaatggcgtcgccagtggtggagttaccgttctcacccgcaaaaaacgcacccacgccggggacgtttttgagcgcgtcggtaaggttggttgcgccctgatctttaatcacttgttcagaaattaccgtcatcgtgcgggtagtatccgctaccggacgcgagaatttcggatcggcagattgttgtggcgcataaagcgaaggcgttgatgcttcgacaaccagcgtgtcatccgcgttagtttgcccttcggcggcgagtgcctgagccacaggcgtgatgccaatacaaagaccggcaaagaacgtgagcgaatgaaattgtctggcagggaaattgcgattgttttccattttgcaggtgactttttcttatatgttgaaattttcactgccacgagaaagcctctctgcggatgcgatgccactgttaatcccgtgatagtgctcgtgaaagtgataataattttgataagcattatcacttggagcgattttctatcacccattgcgcgaaaaagaaatacatttatttacattgagttcatatttgatgttttttgattacaaaacagacgaaaactgcatccagaggcgaatgcagttacgttggtggggttatttgtagatggttgcagtaccgaacatctggtcatttccgcctgcggaattaatgacataacctttcgcgccttgttcgcgcgctttttctgccagtttatcctccagatcgcttaggtttgatgcgccagttgccgaaacggtaccggcgggccgtagctgaccgctgtccaggttactcatcggttgcgcggcataagccgtgagagagattccgctcaggacggtggcaatcagtagtgtgaggcactttttcataatgacatcctcataaatacaacgggtagtgcctgataagtgtaggtcgcctgcgcgatgcaaatgacgcaaaaaattgacagagatgtgcttattttttgaacgatatatttttacaaaataagacaaatcaatgacatgcataatgctgatttttatgatgaattgccataaaccatagccatgttaaggttttggggaatgataaacgcagccagatatttaccctgtcgcgttatgcgggtatcttacgccgctgcttaaaggagaatgctatgtccgcccagaaaccggggttgcatccgcgcaaccgtcatcacagccgctacgatctcgccacgctttgtcaggtcaatcctgaactcaggcaattcctcacgcttacacccgccggggagcaaagcgtagactttgccaatccgctggcggtgaaggcgctcaataaggcgttgctggcccatttttacgccgtagcgaactgggatatccccgacggttttctctgcccaccagtaccgggccgggcggattatattcatcaccttgccgatttactggcagaagcaagcggaacaattccagcgaatgccagcattctggatatcggcgttggtgcgaactgtatttatccgctgattggcgtacatgaatatggctggcgttttaccggtagtgaaaccagcagccaggcgttaagcagtgcgcaggcgattatcagttctaatccggggcttaaccgcgccattcgtctgcgtcggcaaaaagagagtggggcgatttttaacggcatcatccataaaaacgagcaatacgacgcgaccttgtgtaacccgccattccacgattccgccgctgcggcacgggcaggtagtgagcgtaaacgccgtaacctggggctgaacaaagacgatgcactgaactttggcggccagcaacaggagttgtggtgtgaaggcggtgaagtcacctttatcaaaaagatgattgaagagagcaaaggcttcgcgaagcaggtgatgtggtttacatcactggtatctcgtggtgaaaacttaccgccgttgtatcgtgccctgacggacgtgggcgcggtgaaggtggttaaaaaagagatggcccaggggcaaaagcagagtcgctttattgcctggacctttatgaacgacgagcagcgccgccgttttgtcaatcgccagcgttaaagcgttggttcccccggcggtaacggttcagccggggtcgcgcccggagcaggcagcacctgataagtctgcactggcgcgcgaacgcccgccaggtcgaaatgttttttcacctggctgtcgagggcaaagcgtaccgtccactgtttgagtggcagcgtggtgaacgaaacacgcagtgtaaacgcggtattgcttaagccgacaatcccggcaaaattcggttcaccaataatcagcccgcgaatttcttcgttttccattaattccgctaccgcatctttcagtgcctgattggctttatcagcatcttcatggcgatcaacatcataatttgccaccaccgaaccaatgccgcggacaaagttagcaaaggtggttatcgaagaccacggaatgatgtgatacgccccggtatcctgtcgtacgcccacggagcgaatcgacatccgttccactgtgccggtcaacggcccgatagtcaccaaatctccagtgttcatgccgttttcaaactgaataaataccccggtgataatatctttcaccagcgtttgcgaaccaaacgagatagccagacctaatgccccggcacctgccagcaatggcgcgatattgacgccgatttccgacaacacaatcatgatggtgatggtactgataatcaccgccagcgcgttacgaaacagcgtaagcagggtacgcgtgcgggcgctgggtagcgggcggccatgaatatccgaagccagccggttttcgatcaaactggcgagcaccgtccagccaaccgccgagaagaaaagaatgagtgcgatacggatcaggatatctacggttttctgccccgcgccgttttgcagccagttccagaaatcgaacaatccccatgcgctcaacagcaacattaccgccacgcagactgtcagaatacgcgccgttttcagcgccgccgacagccagccattcaaccgtttttgcagctccggatagttacgctgagtatgtggcgagagagtgatggttttcgccagccagcgggaaaacataccggaaacaaacgctgcgataccaataatcgccaggctgcgcaccgttgcacccatcataaatttcaggctgttgcccggatcgaacaacgaaaagaaaaacagcacgataaaataggcgcttgccagccagtgccacaccagcgcaaaggcgcggataaacaggctgaaaaaggccagcgaatgctccgcgaagttgagcaaatgctgggtaatctcttttttattacgaaagatcaggtacaacgcccagacggtcatgcacagcataatgatgacgttcgccagcgcacctatctgtacattcacctgattagagataatcggcacggccacaatcaggccataacctatcaaactgcttaaccagctcaggcgacgactccagtaacgggcgctctcgtcctgaatcgtgaacgggcgcagctccgccacgtttgggcaaaaaatcaggcgtagtacggctttgaaaaattcaatgagggcaaaggcgttgagaaacaaactttgttggaaagcgatggtgcgactgcctgcattcaggttgtcgcttaatacctggccgacaaataatgtcagggccagtaacagcaggtcgataataaacgccccgataatcatcgccggaagctgcaaccagttgctgcgctcacgatttttttgccgcgcccactgacccattttgcgatacagcggcagtgcgcacaggcgaatcagccagtaaaaaccaaacactaataccgctaacattgaaaaatgggtcagcgcattgctgaaggtttgtggattaaacggcttatgcggggagccggtgatattgcgataaagttgcccgaagcgggcggaaagggcttcaccataatggcggctgacttcggtgaccttttgcagcacggtttgctcttcgaccagcgtcggcggcactatttttggtaccggttcagcagggggcgtagcggcaacggtgcgcaactggtcgatcaactctttacgcgaggtgtcattatccagcacatccgccagtgcgccataggccgcttttttttgttcgatatccggttccggggccggttcagtcgttgagtccgttgtcgttgtggttgtaacgccgggtatggataccgcgtgggcaggtgcgcccagcaggcagaagaggatgaacaggatccaccgcatgactcctccagtgagaaaatagagcaaaaagataagtatagatgctggaggaggggcgattttaaatgagaggaatctggtgtgcctccctttcgggtgaaagggaggaagggatattaagcaggttgctgacaacgtgcgggcttttttgccggatgcggcgtgaacgccttatccgtcctacaagttcatgcaattttaataagttgccagatatcctgtaggcctgataagcgtagcgcatcaggcaatgtgtcttattaagagacgtgctgcaaaaattcctgcaagcgctggctcggcgggttcttgatcaacacctgcggattgccatcttccgcaatccggcctttgtcgataaagatcagccgcgaagctactttctcggcaaaaccgatttcgtgggtcacgatcaccatcgtcatcccttcttcagccagatcctgcataaccttcagcacttcatggcgcagttccgggtcaagagcggaagtcggttcatcaaacagcatcattttcggcttcaccgccagcgcgcgggcaatcgccacacgctgctgttgaccaccagaaagttcggaagggtagtgatgtgcacgttctgccagaccgactttcgccagcagctcacgtgccagtttttccgcctcttctttgttcgcgccacgcacgcgtagcgggccaaacatgacgttttccagcgctgtcagatgcgggaagaggtaaaactgctggaacaccatacctgcttcctggcgaatcaggcgctcgtcaactttcggatcgttaaccttcaggccatcgacaatcagatcgccggaggtgatttcttccagtttgttgatgcagcgcagcagggtcgatttaccggaaccggacggcccgataatcaccacgacttcgccctgggcaatgttcaaatcgatattgtgcagcacctgggttgggccaaagtgcttggagacgtttttaaattcaatcacaggattttcatccttctttccagacgacgcagaataaagctcagcaccagggtaataatcagatagaacaccgccacggcgctccagatctcaagggcgcggaagttaccggcaataatttcttgcccctgacgggtcagttccgccacgccgatcacaataaacagcgaggtgtctttaatgctgatgatccactggttacccagcggcggcagcatacgacgcagtgccagcggtaaaatgacgtagcgaatggtttcccaacgtgaaagaccgagcgccagtcctgcttcacgaaaacctttgtggatagacagcaccgcaccacgcgtgatttccgcaatatacgcgccggagttgatcatgatggtgaccaccgccgcagtaaatgggtcgatgcgtaagtcgttaaacgccatcggcagggcgaaataaataaacatcacctggacgacgataggtgtgccgcggatcacttcaataaagaccagcgcgacgtggttggctatccaacctccgaaggtgcgtgcaaaacctgccagcaatccgattaccagaccgcctgccagaccgaggaccgaaatccacagggtcattttggcaccttcaatcagaagcggaatggcaggccagatggcactccagtcaaactgcatatgttgttcctgttaccgtggtgtaaataatcaaattcagggtaattaatggccccggagcgggtttgcgcccctcaccctaatcctctccccataggggagagggaactgccagtgcgttttacaggtgtagcgttattatttcggttcagtaccgaaccattttttgtagatttcgttgtaagttccgttctcgcgcagggttttcaacgcgccgttgactttgtcacgcagctcgtcgctacctttcgggaacgcaataccgtattgctgcgcttccagagagtcacctaccgctttgaactgaccgttaccggcggttttgatgaagtacagaatgtttggcgtatcgtgcagaacggcgtctgcgcggttggtgcccagttccatataggcgttatcgatgttcgggaactgacgcagatctttagttttgatgtttgctttcgcgtaatcaacggagccagtaccgctcttcacagcaaccactttcccgtcgagatctttcacgcttttcacatcgttattgttagctttcaccatcactaacaggccgcttttgtagtagccgtcagagaaatcgatcgcttttttacgctcgtcggtgatggtaatgcccgccagcgccagatcgacgtttttggtttgcagtgccggaatgatcccactgaaatccatcggcttcagttcgtaatccagcttcagctctttagcgatggcagcccacagatcaacgtcaaagcccacatatttatcgccctgtttaaattcaaacggaacgaaggcggtatccgtcgcgacaactaattttttatccgcggcatgagaagaaaccgcaaaagccagggtcagtgcagccagtgaaacttttaatacagacttcatagcatttccttttttctatccacgggacgatcccctgcgtgacattcacatatatgaaaaaatcgtgccagttttgcaactccttgatttttcgagatgcggcaaaaacgtgatgcacgatttatagggcaataccctgaagatgcaccattctggggcaccaatctggtgcgctaaaattgtgcactcaacacagtgattatttagcgtaaaacctgatgaaaaaacaatctttatgtaacgattgtgtgatgatgtggatacaaaaaatttacttaatcagctggagatagcagatggatgcactaaataagtgcgttgaggtgggctgcaaaacaaaacggcctcctgtcaggaagccgcttttatcgggtactaaagttctgcaccatcagcgatggatttattcgatgttagactcgataaaccacaggaatttatccaggtcgcgagacgcggcggtcaggatatctgcggtgtcgtcatctttcgcttcgccaatcgctttgcgtacgtcattagcgacgattgcgtaacggtcagccagttctttcaggtgatcctgaacgttgtggatgtccagcgggtaacttttcagcggggttttgctgttgataacttgagtggtccccagagctacaccgcccagctgcactgcacgttctgccatggtatccagatgatcgatcagtgcggtgcggaagccatccagcatttcatgtacggcaatgaagttagcgccgcgcatgttccagtgcgcttgtttggtaatcaaagaaagatcaataaactggataacctggcgattcagcaactctactgttgcttttttctcgctgtcggagacatcgttgcgggtataaagcagattggtcgcttttgatttaactaatttagcggtactcataatttcatatcctcttgatgttatgtcccagtaattaacgagattaagtatagcaccggctatgtgttccgctattctggctgttcctatcacactaatagtggtaacaagcgtgaaaaacaaaactaataaagattcaatgagttagatatattgataagaacaattcttatttatctgctcgccaggaattttcggaataaatatgcttttgcataattcgatatataaagacggtgtagaggaaaagtagcgagaaattctgcatggttatgcataaccatgcagaaatgtaaatttaattaatgtctaattcttttattttgctctctttgcgtactgtcagcgtagaccccattgaagcggcgatgatagcgccgagcgccagtagctgtatgggtgtcagtgtttctccgaggaaaatcatcccggaaacggcagccagcgccggttccatgctcatcagcgtaccaaatgtccgtgttggcaaacgggtgagggcaatcatttccagcgaataaggcagagcggtcgagagaatagcgacagccagacccaatggaataaccgaccagtgccagagtgcttcaccagcctgaagcgctccaattggcacgaaaattaacgctgcaatcaacgaaccaattgccaccgtcgcagggccatgttccgctcctgcgcgttgcccacttaaaatgtaaatagcccaacaagccccggcccccagtgccagcgcacagccggttaaatcgacatgggaaacgtcttgccccagcggtagcaggaaccacagaccaagaaccgccagcacaacccagacgaaatctaccgggcgacgagaagagaacagcgccaccgccagtggtccggtgaactccagcgccaccgcaatacccagcggtactgtctgaatagaaagataaaaaagataattcatcccacccagcgaaacgccgtaaaacaacagcggtaaccgttgctctttggcaaagcgcagtcgccatggcttaaagaacgcgatgaggatcagcgttcctaatgccagacgcagcgcagtgacacccggtgcgcccaccagaggaaaaagtgacttagctaacgaggctccaccctgaatagacgccatggcaacgagcaatatgactattggtaaccagaccggcattttacgtaatgaaccaggcatcctttctcccacaaatatctagacttaagtaaagcgtggagtgtactggatatacccaatgctggttgagcatttgttgaaaaaattttcccccgttttgactaaaatgcgccaggattgatggaatcattagtctggtgattaggaataatctggatgaatgacagggaaaacatgcgtaatacttacgcagttctctgaaaaagtgatttaaatttagatggatagcggtgtatggaaacgttctgttacatgaaatggcccgttagacatcacaaatcgcgaagagtttcccattaatttttgatatatttaaaacttaggacttatttgaatcacatttgaggtggttatgaaaaaaattgcatgtctttcagcactggccgcagttctggctttcaccgcaggtacttccgtagctgcgacttctactgtaactggcggttacgcacagagcgacgctcagggccaaatgaacaaaatgggcggtttcaacctgaaataccgctatgaagaagacaacagcccgctgggtgtgatcggttctttcacttacaccgagaaaagccgtactgcaagctctggtgactacaacaaaaaccagtactacggcatcactgctggtccggcttaccgcattaacgactgggcaagcatctacggtgtagtgggtgtgggttatggtaaattccagaccactgaatacccgacctacaaacacgacaccagcgactacggtttctcctacggtgcgggtctgcagttcaacccgatggaaaacgttgctctggacttctcttacgagcagagccgtattcgtagcgttgacgtaggcacctggattgccggtgttggttaccgcttctaatcactttggtgatataaaaaatccgcctctcggggcggatttttgtttttaaggtttcgggtcgaaaatatcggttccgagatggttgtaatccaccttctgtaactggaagttggtgatgtatatcggcccggctttcttctcagatataaacgggtatttgatgttaatttccttcgctttaatccccgtccactgggagaaaaagcctaagaagtcattggctgagcggcgggctttaatcacacgatgcgctttatcgtcgctggaaatgaccataaaaggcacctggaaattttgctgatatttatcatcatgggcaaggtattgcacgtctttaccgcgctctttaaaggccagaccgtggtcagaaaagtaaaccagcgagaagctgctgccgctgttgcgtaactgatcgtacagcttgcgcagtaaatcgtccgtttgcgtcatggtatagagatagcacgacgtttctttcgattgcacaaaggtttcgtattttccttgtgtcctgtcgcaggcctgcggatgtgagcccatcagatgtagaacaatcagctgcggttgcgagtgctcttgcgccagcacttgagcggtcatatccagtaacgcttcgtctttggtgtttttatctgcttcaaaattaccttctttcaggaagtacacttcatctgctcgtttggcgatgctggcgatagcggtatcgtattcgccgatttgaccctggttggaaaaccaccaggtctggaagcccgcgcgatttgccagggtgacaaagttatcctgaaactgtggtttgccatcgacaacgcgattgagcgttaagccaagcgatttctgcgtggagccactggcggcaatgtagtcagcaaatatcaaaccgttaacgctgctggcaaacggggtattgtcccagtgaccgccaaaggcaccgagggcatcgcgacgcgcgctttcaccgatcaccaccacataggtctgatacttcggcttaacggcagtgaccgtccaggtatctttcattccggaaagttttgccatccgttcttgctcttcaatcacctcgttattattgacgatgacatccttagcaaaacgaaataccggatagccagtatctttcagtttaaatacgccaccccaggccaggttttgcacgggagcaacaaaaaatgtcgccacactgaataccagacacaggctgtcgaaggtattccagcgcgctttttcattctctttttttcgcctgattgctattacgccgagcgcaaaaataaataagccgaccaggtagctgtaccacggaaaaatcgtcaggatttcggtcgactcttccatattggtggagtgcaatgccagcaatgtattgaaattaggcgcgccgtaggcctgagcaaaagggaaataacaagccgccaccagcgaactgacaccgaccagaactttttgtacgcgaggcaatgttcgccatagcaaaagcaaaatagccgtaaacgcagcggtgtagagcaaactgaaggggtaacctaagccgaggttaattaatagcgactgtaaaaagtagaacgcagtccacgggctaaatacccggctacgggtaacaagcgattctttgagggttaaattcatatgccactatcgtaacaaacgccatgtgcttaccctggcgtcaagggtcaatacctgcaagagtgcgtgaagagtggaaaggggtccgcatccgcgagccgcaatatacgcagggctgcaagaagatagagcgagccgccgttcaggtcaactactgacgaacaaatcttttgcgaaggggattgcaaatccgacaaaaagtggggtttttcagaccaaaacgcgttatgcctgcatgaaagcaggagtgaagcggcgtaccgcgacgccgctatttatcggaaggtttatcttgctgcggtttgttgttgaccatatcgcacaacatagagagcagcattaaccgtactttaaagggagaatgactaaacacgcgcatacacctcttgaactcattcataagacctcctgacttgctaatcccgtcgatccttgagggatgattgcattacatacagatatagcacaggctatattatatagctattgctaaaacgttaattttttgtaccttcgcaactctggtttacaatgtgcgcacgaaatgagaacgctatgtatgcgtcaccataatgaggaagcacaatgagtcgtcgcgcaggtacgccaacagcaaaaaaagtgacgcagttagtgaacgtggaagagcacgttgaagggttccgccaggtcagagaggcgcatcggcgcgagcttattgatgattacgttgagctgatttctgacttgatcagggaagtgggggaagctcgtcaggtggacatggctgctcgtctgggagtttcgcaaccgacggtggctaaaatgcttaagcggctggcaaccatggggctgattgaaatgatcccctggcgtggcgtgtttttaacggcagaaggagagaagctggcgcaggaaagccgcgagcgacatcagatagtcgaaaatttcttgttggtgttgggcgtcagtccggaaatcgcccgtcgcgacgcggaaggcatggagcaccatgttagtgaagagacgctcgacgcttttcgtttgtttacccagaaacacggtgccaaatgagcctgccttttttacgcacgctgcaaggcgatcgtttttttcagttattaattcttgttggtatcggattaagctttttcgtgccctttgcaccgaaatcctggcctgctgctatcgactggcacaccatcatcaccttaagcggcctgatgctgctgaccaaaggtgtggagttaagcggttattttgatgtgctggggcgcaaaatggtgcgccgctttgctacggagcgtcggctggcgatgtttatggtgctggcggcggcgctgctttctacctttctgaccaacgatgtcgcgctgtttattgttgttccgctgactatcacgctaaaaagactgtgtgagatcccggttaatcggctgattatttttgaggcgctggcagtcaacgctggttcgctactgacgccaattggcaacccgcaaaatattcttatctggggacgttctggtctttcgtttgccggatttattgcccaaatggcaccgctggctggcgcaatgatgctgacgctcctgctcctgtgctggtgttgtttccctggaaaggcgatgcaataccatacgggggtgcaaacaccggagtggaaaccgcggctggtgtggagttgtctggggctgtatatcgtctttctgacggcgctggagttcaaacaagagctgtggggactggtgattgtggcggcaggctttgcgctgctggcacgtcgcgtggtgctcagtgtggactggacgctgctgctggtgtttatggcgatgtttatcgacgtccatttactgacccagcttccagcgttgcaaggcgtgttgggtaacgtgagtcatctatctgaacccgggttatggttaacggcaatcggtttatcgcaggtgatcagtaacgtgccgagtaccatattgttgctgaactatgtgccgccgtctttattactggtatgggcggtaaacgtaggtggctttgggttattacccggatcgctggcaaatttgattgcgctacgtatggcgaacgatcgccgcatctggtggcgtttccatctctattcaataccgatgctgttgtgggcggcgttggtgggatatgttttgttagttatactcccggccaactagggtctggcaaataaaaaaggcggattatgagtccgccttttgctttaagttttgaagattaattcagacgaaccggcatcccggagcggtttttaatcgcttcatcaagaacaacctggtcaacatctggctgaccggtcactgtctgcacgctcttcgtcagggtaattggcacaatttcctgaccttcaaactgggcttcggtggtagacagcgggttatggacttcaatataacggctgccgtctggctcggtggtcgcttttaccggctcatcaataaactgtacgcgggtaccgaccggtactttctcgaacaggaatttgatgtcttcgttacgcagacgcacacaaccatgacttacacgcaggccgataccgaagttggcgttggtgccatggatagcatacaggcgaccgatatagagtgcatacagccccatcgggttatccggacctgccggaacgacagccggaagcggttcgcccgcagcgcggtactctgcgtgcattttggcggtcggcgtccaggtcgggcctgcttttttacgctcaactttggtggtccagttgataggcgtatctttgcctaactgaccaatgccgatcggcagcacgataacggtgttggtccctttcggatagtaataaagacgcatctcagcactgttaatgacgatgccttcatgaacggtatccggcaggatcagctgctgcggaatgttcagtacagtaccgcctttcggcaggaaggtatccacacccgggttcgcttccatcatattggaaagccccatctggtactcggcggcaaaatactccagcggctgagtgttaccttcaggaatggtgatcacctgattctgaccaaccaggcgactcccgtcggttggcagaggataagttaccgcagaggcggtactgcaaaagccgacaacagcgaaggccgctgcgaataatgttttcaatttcatattcatgttaagcgagattttgtgcctggcaggccattgggttgagaatattagagtattggaagcgcattataagttcattccagctcacagtgaaatcagatgtgtacgaaatcacattttttgcctttggcttgagtgtagaccttaagcgaggagcaggatcttctttcagacttatggcataatgcgcggtttgtcatatctcttttcaggatacgcctgtgttagtttccagtaacgtcaccatgcagttcggcagtaagccgttgtttgaaaacatttccgtcaaatttggcggcggcaaccgttacggcctgattggcgcgaacggtagtggtaaatccacctttatgaagatcctcggcggcgaccttgagccgacgctgggtaacgtttccctcgatcccaacgagcgcattggtaaactgcgtcaggatcagtttgcctttgaagagttcactgtgctggatacggtgatcatggggcataaagagttgtgggaagtgaagcaggagcgcgaccgcatctatgctttgccggaaatgagtgaagaagacggctataaagtggccgatctggaagttaaatacggcgaaatggacggttactctgcggaagctcgcgccggtgaactgttgcttggcgtgggaattccagtggaacagcactacggcccgatgagtgaagttgctcctggctggaagctgcgtgtgcttctggcgcaggcgctgtttgctgatccggatattctcctgctcgacgaaccgaccaacaacctcgacatcgacaccattcgctggctggaacaggtgctgaacgagcgtgacagcaccatgatcatcatctcgcacgaccgtcacttccttaacatggtctgtacccacatggcggatctggattacggcgagctgcgcgtttatccgggtaactacgatgagtacatgacggcggcgacccaggcgcgtgaacgtctgctggccgataacgccaagaagaaagcgcagattgctgagttgcaatctttcgttagccgctttagcgccaacgcctcgaaatctcgccaggcaacttcgcgcgcgcgccagattgataaaatcaaactggaagaggtgaaagcctccagccgtcagaacccgttcatccgttttgaacaggataagaaactgttccgtaacgcgctggaagtggaaggtctgaccaaagggtttgataacggtccgctgtttaaaaatctcaacctgctgctggaagtgggtgaaaaactggcggtactgggtaccaacggcgtcggtaaatcaacgctgctgaaaacgctggtgggcgatctgcaaccggacagcggcaccgtaaaatggtctgagaacgcgcgcattggttactatgctcaggaccacgaatatgagtttgaaaatgatctgaccgtgttcgaatggatgagccagtggaagcaggaaggcgatgacgagcaggcggtacgcagtattctcggtcgtttgctgttcagccaggacgacatcaaaaagccagctaaagtgctttccggtggggaaaaagggcggatgctgtttggtaagttaatgatgcagaagccgaacattctgatcatggacgaaccgaccaaccacctggatatggaatccattgagtcgctgaacatggcactggaactgtatcagggcacgctgatctttgtttcacacgaccgtgagttcgtaagctccctggcgacccgcattctggaaatcaccccggaacgcgtgatcgactttagcggtaattacgaagattacctgcgtagtaaagggatcgagtaagtgattatccgtcaccccgatactgtcggggtgacggcggctgatgacaaatgcaaaatagcctgatgcgctacgcttatcaggcctacgcagtacctgcaatatattgaatctgcaggactttgtaggccggataaggcgttaacgccgcatcaggcattaacaaagcgcatttgtcagcaatctgagtaacgtcgaatcgattttcttaatcccacatcaattcacttccattaattctcaaacatccatgcccaacgctcgcttaccgtgaatgttgaggtcggcaagcgtaaagcgtccttcccagtttgtttcatagtcctcgcgcgggaagtcgcccggcgatgcgcctttttccagtgcggccttcaccttgtgcgcgtaggcaagatttttctcgcacatcggtgccgcaggaatgtacatcacgttgccccaaccttgttgattttcaacgggggcaacggaatggatgacgtcgcagtgccaccagacggagtctccggcttcgagttttggaatgctggttaacgcctcaatcaacagtggatgccattgctctgataccggcaatactcttccgggcgctacgccgcacagttcatcctccggcacatcatcaagcagcggacgtaacagtacgtacgccatagcttcaggaatgggcacgacgtgcagcagcccctgaccaggcagcatatcagagagcgctgtccagccctggaatgtccgaaacacggaacatttggtggtgttgtccaccgtgtactcttcaacttccgtacgatgtgccgcatgccagggatcatattgcgccagattgccattaaagacgttggcgaaaacgcgctgatacgctggaagcagccagcgttccagtgccccggagtcggtatgcgctccaagacctttggaggtcgttccgggcggacggcggcggatacggtcagggtagatgacgctcacatccgggttaaaccattgctttccatcactttcaaatgtccacagacgattgagaaacgactgcgcattcgccatttcttcactctggcgggcctgcatttgcgcctgcgaccagtagatggggtaaatctcgggacgtgaagcgctgagcgtcccgaagaaattatcgccggggcctttgtagacctcgtcaaagcggttgcggtccagatagtccagcatcgactgatcccagcctagcgcttgttcgcgggggaaatggccttttatcaccgcacaaccgcgacgtttaatctgttcgcgctgctctgcagtaacatgacctgctttgatatcggcataagacagcaccggccagacggcatcgccctgtgctttgagtgcgttgatttcagccactcgcgtggcaatgtcatcgcttagctgattaaagatctgctggacgtcgccaagctgcgcccgcagcgcgtgcttcatctgacggatagctgctttgtgatcggcaggcaatgtgtcgctggtaaaagtagaagccataaccacctctcattaactttcattcgaaaccattctgatttgcatgtgacaatataagttataaataagttaatgcaagtttaatgatttgatgtgatgtacaggatgtaaaaagaagggaaaaccggagcgcacggctccggtagagaggtcagctgttaaaaggggatgtgttatccagcaccgcctgaatcacattcagcgcgccttcatgattattatcatcggtagcgtaacgggcgatttgtttaatgttttccgcagcattgcccatcgcaaaggaataacgcgccattttcagcatctccgcatcgttaccgctgtcgccaatcgctaccacattttgcggtgacagatcccagcgtttcagtaaccgcgaaataccgtttgctttatgtagaccgggaataatcaggtcgataaagccaaaaccactggtaacgggtttcataatgccatcgagcgctacgtgcagtttgtcgatcactaacgggatttgttcatccggcaggttgagcgaaaacttgaacagtacgtcgtcaatctcctgataatcttttacaggtttcaggcgatggtagtgttttgccatcagtgcgacaaatgcttcgggggcattttcgctgacatatgcactttgcagaccgcaggcgacaaaattgagttgcttatcttttagcaactcgccaataacaatccgcgattcatgtcgggtcagttcgccgtggaacaactgcttgccatgttcgtaaaccagtgcgccgttttccgcgacaaaagagatctcatcctttagctcaggaaagaatgaaataagctggtaatactgattaccgctggcaacaacgaacttaatgccgcgctttttcagttcctgatattgcgccataaaacgtggttggttgtacgttttggcgtcgttaagaaaagtaccgtccatgtctgtgacgataacttttacgctcataggtgtgctcctggctcgaaaatgaaaccgtaacagtgtaataacaatgtgacgcagagcacaaattatatttcgaatgaaagtaaggatgaaattgatgatgtgaatgatttagcccggcgacgacgccgccgggccgaggagattacagcatatgttcagtacgggcgatgatatcgtcctgagcgtctggagagagcgcggtgaagaacgcggaatagcccgcgacacgcactaccagatcgcgatactgatcgggatgttttttcgcatccagcagcgtttcgcgggaaacgatgttgtactgaatatgccagcctttatgcacttcaaagaaggtacgcagcaggatcatcagtttctgcttgtcagattcgttctccagcgttgccggattcagtttctggttgagcaacacgccgccgagaatcgctgccgtaggcagtttacccactgagccaatgaccgcagtagggccaagatggtcagtaccggaggccgggcttgcgccttctgccagcggggtgtgggctttacgcccgtccggtgttgccatagtctgcgcgccaaacggtacgttagcggagattgatgacgtacccgcgtaatagttgccgccaaccggaccacgaccgtagcgcggattatggtactgtttcagttcgtcgatataggtctgataagcgcgagccagcagcgtatcgacagtatcatcgtcgttgccgtacttcggcgcaccgttaatcagccgctgacgcagctgctcgtgagtcaggccgtcgaagtcatctgccagtgcggcagcaagctgttgctgaccaatcgcaccttgttcaaacaccagtttcttcactgccgccaggctgttgccgaggttggcaatgccgacctgcaggccagaaacccagtcatatttcgcgccgccttgcttgatacttttcgctcgctcaatacagtcatccaccagcgccgagcagagaatatcgtgcacgttctcttccagcatggtgtcgacgacatattcgatttcgattgatttgcgggtgtagtaacggatttgcgtatcccacgcgtccatcacttcatcgaagttgttgaagttacctgccgacaacgctttttcttgtggcaggaacactttgccgctggtggcatcatgcccgccttccagcgccgccagcatcacgcgggcgaagttgataaagctcatgccggtacagcgatagccccatttgccaccgacggcggtttctatacaaccaatcgctgcgtagtcataagcgtcctgcggttcaataccgagtttaataaattccgggatcacgatttcgtcgttgttgaacgccggcatcccgaagccgcaacggatcacctgtacgcaggcgtcgaggaaatcgttgctcattcctgcatggtaacgcacgctgaggttaggctgagtggaacgcaggcgaccgcaggattcgaggatcgcgtaagagagtggattcaccgcgtccattggttgaccatcaaccagattttgcccgccaatagtgacgttctgatacagcggacttcccgcagaggcttttgagtgtgagccggagcggatcttgttcacttccagcagtttcagccagcagctatgcagcatctcgatggcgtgttcgcgatccagcgtctggttgagttcaacgtcgcggcgatagtacgggtagagatactggtccatacgaccaaacgatactgagtgaccgttagattcgatctgcaaaatcaactggatgaagtaacacagttgcagcgcctgccagaaagtctgcggcggctggtgggcgataagatcgcagttttctgccatcgccagcagttcatcgcgacggctttcgcgggtttcggtcgcggccatttcacgcgccagggcagcgaaacgttcaatgtgttcactgactgccaccagcacgatatcaatcgctttcaggaattgctcaccgtgtaaatcttccagcaccgtcaggttgatgcgcgagcgacgttccgctacttcctcgcgcagaccatcaagccctttttccagcagcagcgggaaattcaccgccaggtgcgcatcgccggaggtcatattgccttccgctttaatgattccggtcgccagcagacctttttgctcatcggtaaacatgccgtagcagcgatcctgtacggtctgaccgcgccaccacgggcacacttcatgcagaacgcgtttgttctcttcgctcaccgcaaagccagcaccgggacgatctgccagatcatcaatctctttttcgatccacgagacagtatattccgggaagatcggcgcggcgcgaacttcgcttgcctggttgccaatgatcaactcatcgtgtttgatccagatggtgcgattcgccaggtgatgcgccagtgccagcgcgcgacgtaccgggatcggcttatcgagatgttgttgatacatctcggtatagtgctgcgcgcgctcggtacagactggcggtttcacaatatgcaccagcgcatttttgtgcgctttaatgcggtcgctgagcgtgtccagtttcagtgtggtcatggttgttatcctcgtaaggtcgcggttaaccctttctggcaggcatactgctgggcaaagtcgagcagttctggcgcatcaagcggtttttccggggcgtcatagggcagattaagtaagtgatatttgttgatgcccagcgtgtggtagggcagaaaatgaatttcgccaacgtgcagctcgtcggcggcaaaatcggtaatggcttttacagaggtttcgtcggcattaaagccctgaatcagcggcacgcggataatgatttttttgcccgctgcggcgagttttttcaggttatccagcactctggcggcgttaccgtcggtccactgtttaaacggcgcgtcggcaacgtgttttaaatcggcaagaaacagatcgatatagggcagagaaggggcgatatatttccacggcacatgcagacaggtttctaccgcagtatgaatgcctgcctcgtggctggcttgcagtagcgccatcgccatttccggctgcataaagggctcaccacccgaaagcgttaaaccgccgccgctgcgatcgtaaaacggtttatcgcgcagaacggtcgtcatgatctcctcaacgcttttcacttcaccacacacggttaatgcctgtgtcggacagcagtcggttaacgccgtcagatgctccggggttaacttttcccgatgaataagcaaaccattcagcgcgcgctcaatcacttccggcgcggccttagcgcacagctcgcagccttccagacacagtcgtgcgtcatacagcagatcctgcgtgcgggcgcggctttccgggttctgacaccagcggcagcccagcgaacagcctttaagaaatacgaccgtgcggataccggggccatcatgggtcgagtagcgctgaatattgaaaatcatagttgcctctctatttcgttcaagcattaaaatactttcgaatgaaagttagattgatgtgcgtcaactgttcagagagttttcccgtgatagtctacattcagacaaaaagtacattttgaggatggttatggaactgtatctggatacttcagacgttgttgcggtgaaggcgctgtcacgtatttttccgctggcgggtgtgaccactaacccaagcattatcgccgcgggtaaaaaaccgctggatgttgtgcttccgcaacttcatgaagcgatgggcggtcaggggcgtctgtttgcccaggtaatggctaccactgccgaagggatggttaatgacgcgcttaagctgcgttctattattgcggatatcgtggtgaaagttccggtgaccgccgaggggctggcagctattaagatgttaaaagcggaagggattccgacgctgggaaccgcggtatatggcgcagcacaagggctgctgtcggcgctggcaggtgcggaatatgttgcgccttacgttaatcgtattgatgctcagggcggtagcggcattcagactgtgaccgacttacaccagttattgaaaatgcatgcgccgcaggcgaaagtgctggcagcgagtttcaaaaccccgcgtcaggcgctggactgcttactggcaggatgtgaatcaattactctgccactggatgtggcacaacagatgattagctatccggcggttgatgccgctgtggcgaagtttgagcaggactggcagggagcgtttggcagaacgtcgatttaaccggacgttctgcatcctcataaattgctgatgacgtggcggagtgccgcgtcttatcaggcctggaggtggcaattactgcccacacacctcacaccccggattacgcatcagtttcatttcgcgaaactgacaggtcatcgcatcgtacatgacgattttcccgctggccggtttgccataacctgccagcattttgatcgcttccattgcctgcaacgaaccaattacgccgatcaacggtgccattacgcctgcttccacgcaggttaatgcattttcaccaaacaaacggctaaggcagcgatagcacggttcaccgtcctgataagtaaagacggtgatttgaccttccatacgaattgccgcgccggaaaccagcggtaccttcgcggcaaaacagcctgcgttcagttgattacgtaccgcaacgttatccgtacagtcgagcaccagatcgtgttcagcaatcaatgctgcaagttctgcgtcatccagcagtgcattgactggcgtaatcgcgatatgtgggttgatccgcgtcagggcgtcacgggcggattccaccttcggttgcccgaccgtggcatcactgtgcagtgtctggcgttgcagattcgagagcgaaaccgtgtcgaagtcgagcagcgtcaggttaccgacaccggcgcttgccagatactgcgaggctgcacagccgaggccgcccaggcccactatcagcacgcgagaatctttcagcgcctcctggccgtcaaaatcaaagccgcgcagaatgatttgccggttgtagcgcagcatctcctgatcgctgagttccgccattacaggcctccgaacaacgcgttaaacggttctacttccacccattcgcccacttccacattgccgcgatcgcgttccagcacgataaagcagttgccgaggctaaaggagctaaatatatgtgaaccctgatgtccggtggtcgtcacttccagttcgccatcggcgttgcgttgcagcacgccgcgctggaaatcaagacgtcctggcgtttttttcaggcgggacgctgtgcgtacgcgctggcgcgcgggcaggccgctggcggtgttaccgcttagttttgccagcaaaggctgtaccagttgatagaaggtcagcgtcgctgaaaccgggttgcccggcaggccgcagaaccagctattgctgagtttaccgaacgcgaacggtttacctggtttaatcgccagcttccagaaggcgatctcccccagctcttcaagaatcgttttggtgtaatccgcctcacccactgaaacaccgccggaactgatcaccacatccgcctggctgtcggcttcaataaatgcggcgcgcagggcatggggatcgtcgcggataatccctaagttaattacctcgcatcccaactgttctaacatcaggtgtacggcgagacggttggtatcgtagatttggccgtcgcccagcggctgaccgggcaactggagttcatcaccggtagaaaaaagcgctacacgcactttacgaatcaccggaacttcggcaatccccagtgaagcaattactggcagctctgcggtagtcaggcgagttcccgccgggaaaacaaccgcacctgcagagatatcttcaccgcgacggcgaatattttgcccgctacgcacttcagcagtaaaacgcacgccattgtccatttgttcagtctgctcctgcatcaccaccgcttcgcagccttccggcaccggcgcaccggtcataatacgaatgcaggtacccgcaggccattcaccatggtatggctgaccggcaaaggatttaccggcaacgggcagcggttgcccggaggcaatatcggctaaacgcaccgcgtagccgtccattgcggagttatcaaaccccggaacatcaagcggcgaaacgacatcgctcgccagaatacgaccaaaacactgtaccagtggcagcgtttcctgggcggtcagtggggtgacgcgagaaagcatctcattaagcgcggtgtcgagcgacatcaatccggtggtaaattccatgaaaacactcctgcggaggcaaaatcgaatttgcctattatgtcagaaaaacgccacagactgtatgccacctcgggcgtagcgctgggtcctgcctttacatgccatatccatctttctatattcaaaaattgaatgagtaattcataaaaattctgatatttatagcaaaagtggcgaaccacccttaatggacgaatactatgggcaaagcagtcattgcaattcatggtggcgcaggtgcaattagccgcgcgcagatgagtctgcaacaggaattacgctacatcgaggcgttgtctgccattgttgaaaccgggcagaaaatgctggaagcgggcgaaagtgcgctggatgtggtgacggaagcggtgcgtctgctggaagagtgtccactgtttaacgccggaattggcgctgtctttacgcgtgatgaaacccatgaactggacgcctgtgtgatggatggtaacaccctgaaagccggtgcggtggcgggcgttagtcatctgcgtaatccggttcttgccgcccggctggtgatggagcaaagcccgcatgtgatgatgattggcgaaggggcagaaaattttgcgtttgctcgtggcatggagcgcgtctcgccggagattttctccacgtctttgcgttatgaacaactactggcagcgcgcaaggaaggggcaaccgtcctcgaccatagcggtgcgccactggatgaaaaacagaaaatgggcaccgtgggggccgtggcgttggatttagacggcaatttggcggcagccacgtccacaggcggaatgaccaataaattacccggacgagttggcgatagtcccttagtgggtgccggatgctacgccaataacgccagtgtggcggtttcttgtaccggcacgggcgaagtcttcatccgcgcgctggcggcatatgacatcgccgcgttaatggattacggcggattaagtctcgcggaagcctgcgagcgggtagtaatggaaaaactccctgcgcttggcggtagcggtggcttaatcgctatcgaccatgaagggaatgtcgcgctaccgtttaacaccgaaggaatgtatcgcgcctggggctacgcaggcgatacgccaaccaccggtatctaccgtgaaaaaggggacaccgttgccacacagtgatgaacttgatgccggtaatgtgctggcggttgaaaatctgaatattgcctttatgcaggaccagcagaaaatagctgcggtccgcaatctctcttttagtctgcaacgcggtgagacgctggcaattgttggcgaatccggctccggtaagtcagtgactgcgttggcattgatgcgcctgttggaacaggcgggcggtttagtacagtgcgataaaatgctgttgcagcggcgcagtcgcgaagtgattgaacttagcgagcagaacgctgcacaaatgcgccatgttcgcggtgcggatatggcgatgatatttcaggagccgatgacatcgctgaacccggtatttactgtgggtgaacagattgccgaatcaattcgtctgcatcagaacgccagtcgtgaagaagcgatggtcgaggcgaagcggatgctggatcaggtacgcattcctgaggcacaaaccattctttcacgttatccgcatcaactctctggcgggatgcgccagcgagtgatgattgcgatggcgctgtcatgccgcccggcggtgctgattgccgatgagccaaccaccgcgctggatgtcactattcaggcgcagatcctgcaattaatcaaagtattgcaaaaagagatgtcgatgggcgttatctttatcactcacgatatgggcgtggtggcagagattgccgatcgggtactggtgatgtatcagggcgaggcggtggaaacgggtaccgtcgaacagatttttcatgcaccgcaacatccttacacccgtgcgctgttagctgctgttccgcaacttggtgcgatgaaagggttagattatccccgacgtttcccgttgatatcgcttgaacatccagcgaaacaggccccccccatcgagcagaaaacggtggtggatggcgaacctgttttacgagtgcgtaatcttgtcacccgtttccctttgcgcagcggtttgttgaatcgcgtaacgcgggaagtgcatgccgttgagaaagtcagttttgatctctggcctggcgaaacgctatcgctggtgggcgagtctggcagcggtaaatccactaccgggcgggcgttgctgcgcctggtcgaatcgcagggcggcgaaattatctttaacggtcagcgaatcgataccttgtcacccggcaaacttcaggcattacgccgggatattcagtttatttttcaggacccttacgcttcgctggacccacgtcagaccatcggtgattcgattatcgaaccgctgcgtgtacacggtttattgccaggtaaagacgcggctgcacgcgttgcgtggttgctggagcgcgtgggcctgttacctgaacatgcctggcgttacccgcatgagttttccggcggtcagcgccagcgcatctgcattgctcgcgcgttggcattgaatccaaaagtgatcattgccgacgaagccgtttcggcgctggatgtttctattcgcgggcagattatcaacttgttgctcgatctccagcgtgatttcggcattgcgtatctgtttatctcccacgatatggcggtggtagagcggattagtcatcgtgtggcggtgatgtatctcgggcaaattgttgaaattggtccacggcgcgcggtcttcgaaaacccgcagcatccttatacgcgtaaattactggcggcagttccggtcgctgaaccgtcccgacaacgaccgcagcgtgtactgctgtcggacgatcttcccagcaatattcatctgcgtggcgaagaggtggcagccgtctcgttgcaatgcgtcgggccggggcattacgtcgcacaaccacaatcagaatacgcattcatgcgtagataacattcaggcggagaataaaatggcaagagctgtacaccgtagtgggttagtggcgctgggcattgcgacagcgttgatggcatcttgtgcattcgctgccaaagatgtggtggtggcggtaggatcgaatttcaccacgctcgatccgtatgacgcaaatgacacgttatctcaggccgtagcgaaatcgttttaccaggggctgttcggtctggataaagagatgaaactgaaaaacgtgctggcggagagttataccgtttccgatgacggcattacttacaccgtgaaattgcgggaaggcattaaattccaggatggcaccgatttcaacgccgcggcggtgaaagcgaatctggaccgggccagcgatccggcgaatcatcttaaacgctataacctgtataagaatattgctaaaacggaagcgatcgatccgacaacggtaaagattaccctcaaacagccgttctcagcgtttattaatattcttgcccatccggcgaccgcgatgatttcaccggcagcgctggaaaaatatggcaaggagattggtttttatccggtgggaaccggaccgtatgaactggatacctggaatcagaccgattttgtgaaggtgaaaaaattcgcgggttactggcagccaggattgcccaaactggacagcataacctggcgtccggtggcggataacaacacccgcgcggcaatgctgcaaaccggtgaagcgcagtttgctttccccattccttacgagcaggccacactgctggagaaaaacaaaaatatcgagttgatggccagtccgtcaattatgcagcgttatatcagtatgaacgtgacgcaaaagccgttcgataacccgaaggtccgtgaggcgctgaattacgccattaaccgtccggcgctggtgaaagttgcctttgcgggctatgcaacgccagctactggtgtggtaccgccaagtatcgcctacgcgcaaagttataaaccgtggccttacgatccagtgaaagcgcgcgaattactgaaagaggcgggatatcccaacggtttcagtaccacgctgtggtcgtcacataaccacagcaccgcgcagaaagtgctgcaatttacccagcagcagttagcgcaggtcgggattaaagcccaggtgactgcgatggatgccggacagcgggcggcagaagttgaaggtaaagggcaaaaagagagcggcgtgcggatgttctacactggctggtcggcttcaaccggcgaagcggactgggcactatcgccgctgtttgcctcgcagaactggccaccgacgctgtttaataccgcgttttacagcaataaacaggtggatgacttcctggctcaggcactgaaaactaatgatccggcggaaaagacccgcttatataaggcggcgcaggatatcatctggcaagaatcgccgtggatcccgctggtggtagaaaaactggtgtcggcacacagtaaaaacctgaccggtttttggatcatgccagacaccggcttcagctttgaagacgcggatttgcaataagcaacgcagggagtggaatgcttaattacgttatcaaacgcttactggggttgattccgacgctgtttatcgtctcggtgctggtgtttttatttgtccatatgctgcccggcgatccggcgcgattgattgccgggcccgaagctgatgcgcaggttatagaactggtgcgtcagcagctggggttggatcagccgctgtatcaccagttctggcactatatcagcaatgctgtgcagggggattttggcctgtcgatggtgtcgcgtcgtccggttgccgatgagattgccagccgctttatgccaacgctgtggctgaccataaccagtatggtctgggcggttatatttggtatggcggcgggaattatcgccgccgtctggcgtaaccgttggccggatcgattgagtatgaccattgcggtgtcggggatctcgtttccggcatttgctctggggatgcttttaattcaggtattctccgttgaactgggctggctgcctaccgtgggagcagacagttggcagcactacattttaccctccctgacgctcggcgcggcagtggccgccgtgatggcgcgctttacccgcgcgtcgtttgtcgatgttttaagcgaagattatatgcgtaccgcgagggcgaaaggggtgagcgaaacctgggttgtcctcaaacacgggctacgtaacgcgatgatcccggtagtgaccatgatgggcttacagtttggctttttgctcggtggttccatcgttgtggagaaagttttcaactggccgggacttggacgcttactcgttgactccgtagaaatgcgtgattacccggtgattcaggcggaaattctgcttttctcgctggaatttattcttatcaacttagtggtggatgtgctttacgccgccattaacccggctatcaggtacaagtaaggatgcgactatttaactggcgacgtcaggcggtgttaaacgccatgccactggtcaaacctgaccaggtacgtacaccgtggcatgaattctggcgacgatttcgccgtcagcatatggcgatgaccgccgcattattcgttattttattgattgtggtggccatttttgcacgctggatcgctccctatgacgccgaaaattattttgattatgacaatctgaataacggaccttctttgcagcactggtttggcgtcgattcactggggcgtgacattttcagccgtgtcctggttggtgcgcaaatctcgctggcggcgggcgtgtttgccgtgtttatcggtgcggcgatcgggacgttgctgggcttgctcgctggatattatgaaggctggtgggatcggctgatcatgcgcatttgcgatgtgctgtttgccttcccgggtattttactggcgatcgctgttgttgcggtgttgggaagcggcattgctaacgtgattattgcagtcgccattttttccatccccgcgtttgcccgcctggtgcgcggcaacacgctggtgttgaaacagcaaacctttattgagtcagcacgcagtattggtgccagcgatatgaccgttttgttgcgtcatatcctgcctgggaccgtctcttctatcgtggtgtttttcaccatgcgcattggtacctcgattatctctgccgccagcctctcatttctcggcctcggtgcgcagccgccgacaccagagtggggagcaatgctcaatgaggctcgagcggatatggttatcgcgccgcatgtcgctgtttttccggccctggctatttttctgaccgtactggcgttcaatttgttgggcgatggtttacgcgatgcgctggatccgaaaattaaaggatagttacgtttgaatattgcttgaaagggtaatcacctcacaggaaattattgccctaagcaagtgttgtaactttctgctgattttgtagaatcgggtaatttggttaaaaagccgcagcaagggacaatttttgcagcggcacagcgttcagatagttattttgttaaatgtattaacatgctgagtttatacgaaaagataaagataaggctgataattttatttttattggcagcactgtcatttattggtctttttttcatcattaactatcaactggtatcggagcgcgcggtaaaacgtgccgatagccgctttgaacttattcagaaaaacgttggctatttctttaaagatattgaacgttcggccctgacattaaaggactcactgtatttattaaaaaatacagaggagattcaacgcgccgtgattcttaaaatggaaatgatgccatttttagactcggtgggactggtacttgatgataataaatattatcttttttcgcggagggcgaatgataaaatcgttgtttatcatcaggaacaagtaaatggaccgcttgtcgacgagtcagggcgggttatttttgccgattttaacccatcgaaacgaccgtggtcggtggcttcagatgactctaacaacagctggaatccggcatacaattgctttgatcgtccgggtaaaaaatgtatctcttttacgctacacatcaacggcaaagatcacgatttgttagcggtggataaaattcatgtcgatttaaactggcgatatctgaacgagtatcttgatcaaatcagcgctaatgatgaagttctatttttgaaacaaggccatgagatcattgccaagaatcaactcgctcgtgaaaaactgattatttataatagcgaaggtaattataatattattgattctgtcgatactgaatatatcgaaaaaacatcagcggtgccaaacaacgcattattcgaaatctatttttattatcctggcggtaatttattgaacgcatcagataaacttttttatctgccgtttgcgttcattattatcgtattgctggtggtttatttaatgaccactcgtgtgttccgtcggcaattttctgaaatgacagagctggttaatacgctggcgtttttgcctgactcaacggatcaaatcgaggctctgaaaattcgtgaaggcgatgcgaaagagattatcagcatcaaaaattcgatcgcggaaatgaaagatgccgaaattgaacggtcaaataaattgctctcactgatctcttacgatcaggaaagtggttttattaaaaatatggcgattattgagtctaacaataatcagtatctggctgtggggatcatcaaactgtgtggtctggaagccgtggaagcggtgtttggtgttgatgagcgcaataaaatcgtcaggaaattgtgtcagcgaattgccgagaaatatgcgcaatgctgcgatatcgtgacattcaatgccgatctctatttacttctgtgtcgggaaaatgtacagacatttacccgtaaaatagcgatggtaaacgattttgacagcagctttggctaccgcaatctgcgcatccataagtctgccatttgtgaacctttgcagggggaaaacgcctggagttacgcagaaaaactgaaactggcgatttccagtatccgtgaccatatgttctcagagtttattttctgtgatgacgcgaaactcaacgaaatagaagagaatatctggattgcgcgtaatattcgccatgcaatggaaattggcgaactattcctcgtctatcaaccgatcgttgatattaacacccgcgccattctgggcgcggaggcgttgtgccgttgggtgtctgcggagcgggggatcatttcaccgctgaagttcattaccattgctgaagatatcgggtttatcaatgagctgggttatcagattattaaaacggcaatgggtgaattcagacattttagtcagcgtgcgtcgctgaaggatgatttcttactgcatattaatgtttcgccctggcagttaaacgaaccacactttcatgagcgttttaccaccatcatgaaagaaaatggcctgaaggcgaacagcctctgtgttgagatcactgaaaccgtgatcgagcgaattaatgaacatttttatctcaatattgaacaactgcgtaaacaaggggtacggatatcgattgatgactttggcaccggtttgtcaaacctgaaacgtttttatgaaattaatccagacagcataaaggtggactcgcaattcaccggcgatattttcggtactgcgggaaaaattgtgcgcattattttcgacctggcacgctataaccggatcccggtgattgcggaaggcgtagagagcgaagacgttgcgcgcgaattaatcaaattaggatgtgttcaggctcaggggtatctgtaccagaaacccatgccattctccgcctgggataaaagtggaaaattagtaaaagagtagtttacgtatgtccagaatcaataagttcgtacttacagtcagtctgctgatttttatcatgatttcagcagttgcctgcgggatctacactcaaatggtaaaggaacgggtgtatagcctgaaacagtccgttattgatactgcttttgcggtggcaaatattgctgaatatcggcgtagcgtggcaattgatcttatcaacacgctaaatcccacggaggaacagctgttggttggtttgcgcacagcttacgccgactcggtttccccctcttatttgtacgatgtcggtccttatctgatttccagtgacgaatgtattcaggtaaaggagttcgagaaaaattattgtgcagatattatgcaggttgtgaagtatcgacatgtcaaaaatacagggtttatctcttttgacggtaaaaccttcgtctattacctctatccggtaactcacaatcgtagtctgatatttttgcttggtctggagcgtttttctttactgtcaaaatcgctggcgatggacagcgagaacctgatgttctctctatttaagaacggtaaaccggtgaccggtgatgaatataatgctaaaaacgccatcttcaccgtttcggaagcgatggagcacttcgcctatttgccgaccggattgtatgtatttgcgtataaaaaagatgtttatttgcgggtttgtacattgattattttctttgccgcattggtggcagtgatatcgggtgccagttgcctctatctggtacgcagagtgattaatcgtggtattgtggagaaagaagccatcattaataaccattttgaacgcgtactggatggcgggcttttcttttcggctgccgatgtcaaaaaactctacagtatgtataactcggcgttcctggacgacctgaccaaagcaatgggcagaaaatcctttgacgaagatttaaaagcgctgccggaaaaaggcggttatttgtgcctgtttgacgtcgataaattcaaaaacattaacgacaccttcggtcatttgctgggcgatgaagtgttgatgaaagtggtgaaaatccttaaatcacagatcccggtagataaaggtaaagtctaccgcttcggcggtgacgaatttgcggtgatttatacgggtggaacgctggaagagttgctatcgattctaaaagaaatcgttcatttccaggtgggaagcattaatttaagtaccagtatcggtgtagcacattcaaatgaatgtcctaccgtcgaacgcttgaaaatgctggcggatgagcggctgtataagagtaagaaaaacggcagggcacagattagctggcagtaatcattattcgcaggccggacaaatgattttgcccggcctgaattaattaaacccggctaccccacaaatcgtactcatcggcgtgctcgactttcacacgcaggatatcacccggcttaacgttggtttcaccattgagataaaccgcgccgtcgatttccggtgcatctgccatgctgcgaccaatcgcgccttcttcgtccacttcgtcgataatcaccagaatttcacggcccactttctcttgcaggcgctcggcggaaatctgctgctgcagctgcatgaaacggttccagcgttcttctttaacttcttccggaacctggtcaggcagggcattggcgtctgcaccttcaaccgggctgtatttaaagcagccaacgcgatccagacgcgcttctttcaggaagtcgagtagcatctggaaatcttcttctgtctcgccagggaagccgacaataaaggttgagcgtagggtcagttccgggcagatttcgcgccactgtttgatgcgcgccagttggcgatctacagaacccggacgcttcatcagtttgagaatgcgcgggctggcgtgctgcaacggaatgtccagatacggcaggattttgccttctgccatcagtgggatgacgtcgtccacatgcggataagggtaaacgtagtgcagacgtgtccagatccccagtttcgataactgttcgcacaggctgaccatgctggtttttaccggctcgccgttgtggaagccagtacgatgtttaacatcaacgccataggcggaagtatcctgcgagatcaccagaatctctttaacgcccgcatctaccagacgtttcgcttcacttaacacttcgccaatcggacggctcaccaggtcgccgcgcatagacggaataatgcagaaggtgcagcggtgattacagccttcagaaattttcagataggcataatgacgcggcgtcagtttcacaccttgttctggcaccaggctcaggaatgggttgtgtttcggttttggcacgtagtgatgaacgtgctccagaacctgctcatagctatgaggcccggtgatttccagcactttcgggtggacttcgcggatctgatcttcttttgcccccagacaaccggtcacaataaccttgccgttttcattcaacgcttcaccaatggcttccagtgattcttgtaccgcgctgtcaataaagccgcaggtgttgacgatcaccatgtccgcatcgtcatagctcggtaccacgtcataaccttcagtgcggagttcggtgagaatacgctctgaatcaacaaggtttttcggacagccaagggaaacaaagccgattttcggctggggagttactttgctcatagcttaaaaaatattcagttacaggaaaggtcagggcagggattctacagagttctggataaaatttgtatcgcaatctcattcgctggcggaggcgaaggaaatgtaaattttgttaattcggcgtgaagaattgatcctggacagcattttgctcaaaaaatagccatactatttaattgcaacaaggctgggaagaggaggatcgaagtatgttcgttgacagacagcgaatcgatctgctgaaccggttgatcgacgcacgcgttgacctcgccgcatacgtgcaactgaggaaggcaaaaggatacatgtccgtcagcgaaagcaatcatctacgagataacttttttaaactgaatcgcgaactgcacgataaatcgctgcggttgaatcttcatctggatcaggaagagtggagtgctcttcatcatgctgaagaagcattagcgacagccgcagtatgtttgatgagtgggcaccatgattgcccgactgttattaccgtcaacgccgataagcttgaaaattgtctgatgagcttaacgctgagtatccagagcctgcagaagcacgccatgcttgagaaggcctgaaaactaagggggagaaagcgtctcccccttcatgtttaagtttttgtaaaaatgaatttgttatctcctccactgactacgctttaagccagagtcaatccggaggcgttatgcatcgacaatcctttttccttgtgccccttatttgtctttcttccgctctctgggcggctcctgcaacggtaaatgtcgaagtactgcaagacaaactcgaccatccctgggcactggcctttttacccgataatcacggtatgttaatcactctgcgcggcggcgagttgcgtcactggcaagcaggaaaaggattatctgcgccgctttccggagttccggacgtttgggcgcacgggcagggcggcctgctggacgtggttttagcgcctgattttgctcagtctcgccgcatctggttaagttattccgaagttggcgatgatggcaaagccggaactgctgtgggttatggccgcttaagtgatgatctctcaaaagtgaccgacttccgcaccgtctttcgccagatgccaaaactgtctaccggcaaccattttggcgggcggctggtattcgacggtaaaggttatctttttattgctctgggcgaaaacaatcagcgcccgacggcgcaggatctggataaattacagggcaaactggtgcgtctgaccgaccagggcgaaatcccggatgataatccttttataaaggaatccggtgcgcgcgccgagatctggtcttatggcattcgtaatccgcaaggaatggcgatgaatccgtggagtaatgcactgtggctgaatgaacatggcccgcgcggtggtgatgaaattaatatcccgcaaaaaggcaaaaactacggctggccgctggcaacctggggaatcaactattcaggctttaagataccggaagcgaaaggggagatcgtcgccgggaccgagcaacctgttttttactggaaagattcgcccgctgtgagcggcatggccttctataacagcgataaattcccccagtggcagcaaaaattatttattggcgcgctgaaagataaagatgtcattgtgatgagcgtcaacggcgacaaagtgacagaagatggccgtattttaacggacagagggcagcgaattcgtgatgttcgcactggacccgacggttatttatacgttctcaccgacgagtccagtggggaattacttaaagttagcccacgcaattagctaacgggaatcatcaccactttgcgcactgcggggcgttcagtgagttgctgataccagcgttgcagatttggacgcggtgtccaggtcaggccaacgttaaacaaattgtagatgaacggtgcgatagcgatatcgcccacaccaaactcgtcgccagagaaccattttacttttgccagttccgcatcgagcagggcaaacagggcgtcgcactctttgcaactggcatcaatggcggcctgatcgcgctcttccggtggtgttctgactaatcccatcaggatcccgcgatgagcattactgagcgtctggtttgcccagtccatccatttttccgcttccgcacgacgtgccggtgagtcgatccacaggcgtttttgcccgtactgtgccgccagatagcggacaatggcgtttgattcccaaagaatgagatcactttcgtcgtcacgcaacaacggcaccagcccgttagggttcatcgccagaaaatcagcatcgtgatttatcccaaactcacggcccgcgagaatttgctcataaggtagttccagttcttcgagcgtcagcaatactttttttacgttagttgaattattccgaccccacagcgtaatcatactcaccccttttccgacaggcagccacaggctgaacaggactccgatggtgaagtaaagttaacttttaagcaacagctggcaaaaaaatgacaccagaagcagcgaagcggcaggatattgcataaactttaaaaactttaccaacttacggtttctttaagtttgtgtgtgcgttattaatcaccaaacttatcatacggcgatataacgtattttttttgaatggatactcgggtggcatttatgacgcaatactcctctctccttcgtggtcttgcagcgggttctgcatttttattcctttttgccccaacggcattcgcggcggaacaaaccgttgaagcgccgagcgtggatgcgcgtgcatggattttaatggattacgccagcggtaaagtgctggcagaaggcaatgcggatgagaaactggatcccgcgagcctgactaaaatcatgaccagctatgtggttgggcaggcgcttaaggccgataagattaaactcaccgatatggtgacggtcggtaaagatgcctgggcgacgggaaatccggcactgcgtggttcatcggtaatgttcctcaaaccgggcgatcaggtttcggtggcagacttgaacaaaggtgtgattatccagtccggtaatgacgcctgtattgcgctggctgattacgttgccgggagccaggagtcatttattggtctgatgaatggttatgccaaaaaactgggtctgaccaacactaccttccagacggtgcacggcctggatgcgccggggcagttcagcaccgcgcgcgatatggcattgctgggtaaagcattgatccacgatgtgccggaagagtacgccattcataaagagaaagagttcaccttcaacaaaattcgtcagcctaaccgtaaccgtctgctgtggagcagcaatctgaatgttgatggcatgaagacaggaaccacggcaggcgcgggatataatctggttgcttcggctacccagggcgatatgcgtttaatctccgtagtgttgggggcgaaaaccgaccgtatccgttttaatgagtctgagaaattattgacctggggtttccgcttctttgaaaccgtgacgccaattaaacctgatgccacctttgtgactcagcgcgtctggtttggtgataagagcgaagtgaatctcggggcaggtgaagcgggctcagtgaccataccgcgtgggcagctgaaaaacctgaaagcgagttatacgttaacggaaccgcagcttaccgcaccgctgaaaaaaggtcaggttgtcgggaccattgatttccagcttaacggtaaatccattgagcagcgtccgctgatcgtgatggaaaatgtggaagagggcggattctttggtcgggtgtgggatttcgtgatgatgaaattccatcagtggttcggcagctggttctcttaatcttctgataaccggatggcgcgaaacgtcatccggttatacgtcattaatacatcaacttaatgcgctgcgtctgcgcgtacttcacatactcatcttccgggcaacaatcgctcaccacaatatcaaagcgtttcaggtcacccatgcgcgccggacgcaccttgccaaatttactgtggtcgacaaccagcacatgcttttgcgccatcgacatggcccagtgttttaccggcaactcttcaagattaaaacaggtagcgcctttactgacatgcacgcccgccgcagaataaaaagcgatatccgggcaaaaattattcagcgtttgctgaaaatcgatgggtttgaaaatggcgttgctggcgtgaaattcaccaccgcaaagaaacgcgcggcaatggggtttctctttcagcgccagaaaggtatttagcgaataacaaacggcggtaaaagggatttcattatcaatcgcttcaataatccacggcgtggtggtgccacagtcaaaaaagagggtctgatcgggttctaccagcgtcgcagccagttttgccgcccggcgtttttcttccaccaggcgggatttttgatcgcttaacaggtaatggctggcactgcgcggttccagaacaatatagccgccgagcaaaacgacgggcgcactgtggttgttcagatcgcgacgaatcgtcatctccgaaaccccaagcagggcggcggcgtctttaagatgtaacttatcgctgcgttttaattcttgcagcagctgcccgatacgctcttcgcgacgtgtttccataatccctctgaatagttattgaagcgagccgctcaatactacactttttagcagagatcagtcacgcacccagcctttgcggatcggtaatgcaaaacagacgcgataccacgattgcagacgttgatagagtttatgccccatcgcttgccagataatctgggcactaaggcagccaatcatacctgccagcaatccaccgagcatatccagcggccagtggacgccaagataaacgcgcgaccaggcaatgacgacggccagcaccattaaaagtgagccggaccacaggcgatgccagcataaaaatgccagtgcaaaggtgaaaatcaccgtaccgtgatcgcttgggaatgagtcatccgccgcatgatgcaggaagttatagccgatattttcgacaaagggtcggtcgtgcggaaaaagatgtcccatcgtccaggacacaaacaggctgaccgccagcgcgatagcgatttttatcaccagttgccgttgtgctgtaagcccccacaaccaaagtaccacggccagcaacggcaccacggtaatcaaatctttagcaataaaaatcgccaacgagatcatccacggagccgagtctggcgtcgcgttaataagagagaatagagagagattcaaattttccagcataacttcccgacgcaaagtgattaaaagggagccaatacaggcaagtcgttgagaataaagtgcaggttaaactgggtaaagcggcatcgtcttatttccctcaagcggcctgtttacggtgggtgattgtaacgggcataggttaaataaaacttaaagaaagcgtagctatactcgtaataatgtaagaatgtgcttaaccgtggtttcagctacaaaattcgctttctcgttagctgcgcttttattaaactctgcgcgattattattggcgaagaaattgcatgcaaaataaattagcttccggtgccaggcttggacgtcaggcgttacttttccctctctgtctggtgctttacgaattttcaacctatatcggcaacgatatgattcaacccggtatgttggccgtggtggaacaatatcaggcgggcattgattgggttcctacttcgatgaccgcgtatctggcgggcgggatgtttttacaatggctgctggggccgctgtcggatcgtattggtcgccgtccggtgatgctggcgggagtggtgtggtttatcgtcacctgtctggcaatattgctggcgcaaaacattgaacaattcaccctgttgcgcttcttgcagggcataagcctctgtttcattggcgctgtgggatacgccgcaattcaggaatccttcgaagaggcggtttgtatcaagatcaccgcgctgatggcgaacgtggcgctgattgctccgctacttggtccgctggtgggcgcggcgtggatccatgtgctgccctgggaggggatgtttgttttgtttgccgcattggcagcgatctcctttttcggtctgcaacgagccatgcctgaaaccgccacgcgtataggcgagaaactgtcactgaaagaactcggtcgtgactataagctggtgctgaagaacggccgctttgtggcgggggcgctggcgctgggattcgttagtctgccgttgctggcgtggatcgcccagtcgccgattatcatcattaccggcgagcagttgagcagctatgaatatggcttgctgcaagtgcctattttcggggcgttaattgcgggtaacttgctgttagcgcgtctgacctcgcgccgcaccgtacgttcgctgattattatgggcggctggccgattatgattggtctattggtcgctgctgcggcaacggttatctcatcgcacgcgtatttatggatgactgccgggttaagtatttatgctttcggtattggtctggcgaatgcgggactggtgcgattaaccctgtttgccagcgatatgagtaaaggtacggtttctgccgcgatgggaatgctgcaaatgctgatctttaccgttggtattgaaatcagcaaacatgcctggctgaacgggggcaacggactgtttaatctcttcaaccttgtcaacggaattttgtggctgtcgctgatggttatctttttaaaagataaacagatgggaaattctcacgaagggtaaaaaaatgcctgactgctttgtgcgatcaggcattctcgaattaatggtgatggtcgtcaatctggtgttcgataaccatcccttcacctacgctggcaagatggcgaacataaggatgcgggcggtaagccggagctggcgcaggagccacatagacggtttgcggcacagtcgcgacgctgaccgcttgtggaacgctgactgaatcaggaaccacaaccactttgtatccactcggcacatcgacggtgacactttgcgccatcgccacaccagtaaagcccattaaaagcgcgcccaacagtagacaatttttcataatcatttcgcctgaaataatgcagcgggttaatttccgcgaattatgcagccttcattcaggcattgtgttgccgggcgtgctgccggttttattggtcaaatggcgcttcgtgtttaagaactttatcgatcacatccagtacgccttcacggttattggagcctgcgcggtattttgccgctgcgacgaccgcgctaccggcattttccattgcaaaactaaagcctgcctgacgcagcatctcaatatcgttaccgccatcgccaaagaccaccacttcgctgtcgtctattccccataatttctgcagttggcgaaggccattggctttatgtacgccggggataatcagatcgatgctgccgttgccggtgtggaccgacaccataatatcgccgatggcctcatgtaatgctttttgtacttgtggaatcagttcatcggaaagattcaggccaaacttaaagaagatatcctctaagttgtcaaagttatcgacgtattccagacggtgataatacatttccgccaccgttttcatggcatcgtcatattttttgagtgtataggcactattttttccgcaggcaataatttccacttccgggcgcgtcagcaaatgttccacgacagtagcaaacgcatccttcgatagctcgccattaaaaacatctttgccttcgctcactacccagccgccgttttcagccacaaaggcaatttcattagcaatttcagggaagaaagagatcaactgataatattgattcccgctggcgactacaaagcgaattccttgtgctttcatttgctgatactgagccataaaccgctcacggttataggttttttgatcgcttaagaaagtaccatccatgtctaccgcaattaatttaatgctcatcaactattctccatcgccgtctgcgttttggtatcgggtttggcgacggctttcgcgacaatagccgcgagaataaccagcgccagtacaaccagcattgcactacgtaatccataatgttcgccgagatagcccagcagcggcggcccgacgaggaaagccagataaccggtcgttgctaccacactgacgcgggttggtgcatcggggccggtatcgctggcggcagaaatggtcagcgggaagcccagcgaggcacccagtccccagagtacaacagacaccccagcgacccaggcgctatcgacaaaaataatcagcccaatacccaacgcccccattagtgcactggcccgaaccacggcaacgcgactgtaacggtcgatgaaccaaccgccggtgaagcgtccaacggtcatccccagggtaaaaccggcataaatcagcgagccggaagtagggctaaaaccgtgaccgtcaaccattaataagggtaaccagtcgttggcagaaccttcggcaaaggccatcgccagcaccacaacacctatcagcagcaactggatatcgcgataaaaaggtacgcctttttcgccatgctgggtgccatcggcagcatttttgcccgtaccgtcagggattgcctgaatggcgatataaataggtgcgatacctaccagcgccgccaataaaatgtgcaccgttgccggaacgccaaaggccgtcagtgccatcccgacacctgcgcctgccagcgtgcccaggctataaaaaccgtgcatcatcggcaaaaccgtcttattcatttctcgctcaacggcagcaccttcaacgtttatcgccacttccgcagaaccaaaacttgccccaaagacgccgagaccaacggcaaagagcaggggcgatgtcagccagagtgccagacttaatatcatcatcccgatcaatgcgcaggacatcgtgaccaggatgacattacgtgtcccaaagcgtttcactaaccacgccgagcagagaataccgctcatcgaaccgatcgacagaccaaagagaacaccgcccatttcagcgatcgagacagagagaatatcgcggatagcaggcgtacgggttgcccaggacgccattaacaggcctggcaaaaagaagaacataaacagcgcccaggttcggcgtttcaatgcattacgtgaagaatttacggtcatagatcacgtcaaaataagaagagggaagacaacattagcaaggttgtgtacatttgtacacaattgcagagagaggaaatgacatgcgtcgcgctaacgatccgcaacggcgagaaaaaattatccaggccacgctggaggcggtgaaactttacggaatacatgctgttacgcaccgcaaaattgctacccttgccggggtaccgttgggatcgatgacctactatttttcaggaattgatgagttgttactggaggcgttcagcagttttactgagatcatgtcccggcaatatcaggcattttttagcgatgttagtgatgctccgggcgcatgccaggctatcaccgatatgatctacagctcacaggttgcaacgccggataacatggagctgatgtaccagctctacgcgctggctagccgaaaaccgctattaaaaacggtaatgcaaaactggatgcagcgcagtcagcaaacgctcgaacaatggtttgaacccggaaccgcccgcgcgcttgatgcgtttattgaggggatgacgctgcattttgtcaccgaccgtaagccgctatcgcgcgaggagattttgaggatggttgagagggttgcagggtagtagataagttttagataacaaaaaacccatcaaccttgaaccgaaatggcggggttgatgggctccacaaaatggggacatcaaagaaaagcagtggcactaattaagactgatgccctgcggaaaagttctgcggttgtgcaaaaaaatttcattttcagggcaacttcagttttatcctaatcctggccataccatgacgatgattgtccctgccagcgtcagcaggacgttggcgattgcataggtgcccgcatagcccagcgccgggatgttactgcgagctgtatcactgatgatctccattgccggcgcgcaggtacgtgcgcccatcattgcgccgaacaacagcgcgcggttcattcgcaatacataagcaccgaacaagaaacagataaccacgggcaccagactgacaatcaatccggcaatcaacatctgaccgccaatcgcgcccaggccgttattaataccgctaccggcgctcagaccaacgcctgccataaacaccatcaagccgaactctttcaccatgcttaatgcaccctgcggaatgtaaccgaaggtcgggtggttagcacgcataaagcccagcataattccggcgaataacaacccggcagcgttccccatgccgaaactgaatgtgctgaactggaaggtgatcatcccgatcatcagcccaataacaaagaaggcgcagaatgccagcaggtcagtgacctggctgtgaatcgagataaagccgatgcgatcggcgatggtttttacgcggcgggcatcgccgctgacttgtaaaacgtcacctttgttaagcacgacgttgtcatctatcggcatctcaatctggctacgaatgacgcggttaaggaagcaaccgtgatcggtcaacttcagttgtgcgagacgtttacctacagcgttatggtttttaacgaccacttcttcagtgacgatacgcatgtcgagaaggtcacgatcgaaaacttctttaccgttacggaagctgggatcgagtcgggcatgggcgtcgggatagcctaccaacgctatttcatcgcccatttgtagcacggcatcaccgtctggatttgccagaatcccgttacgtcgaatacgttcaatgtagcagccggtttgtcgataaatacccagttcacgcagatttttgccgtcggtccaggccaccagttccgggccgacgcgataggcgcggatcaccggtaaataaaccttacggttggcatcagtgtccaggccacgttcgcgggcgatttgctgggcgctggtctgtaagtcctgatgctgcaatttcggcaagtaacgcgcaccaacaatcaaactcaccagaccgattaaataggttaaggcatacccgaggctcagattatccagtgccagtgagagctgcctgctttccatgccggaatgacgcagtgtatcgccagcaccgaccagaaccggtgtcgacgtcatagagcctgctaacataccggccgtcaggccaatatcccagccaaacagcttacctaaccctaaggcgatcaccagcgcactgccaaccatcaccagtgctaacattaggtaatttttcccatcgcgaaaaaaaatggaaaaaaagttcggtccggcttcgaccccgacgcagaaaataaacagcataaagccaagattaagcgcatcggtgttaatgctgaaatgttgttggcctaataacagcgatacgactaaaacgccaatggaattacccagttggatcgaaccaagtcgtaactttccgagacatagcccaagcgcgaggaccacaaataataacagaatgtaattcccatttaacaattcggcgacgtttatattcacggaggctaacttcttgtttactagtaagctgttgaaagaaatggtaatttacgataatgttttttaccagaattcagggcgcagattcattcagcgcacctaaacgatagtaaagtaacaatatattttactagtgtaatcacattaggtatcaacggctatatgaattgcgttggcctatattagcatggaatgcgaagcggctttatcttactgaacgccacactggcgaaaaatgtgttcgatagacgcagtgtcaggaggaacgagtgaaacataaacaacgttgggcgggggcaatctgctgttttgtcctcttcattgtggtgtgcctttttctggcgacgcacatgaaaggcgcttttcgggctgccgggcatcctgaaatcggcttgctatttttcattcttcctggagcagtcgccagcttcttttcacagcgtagagaagtcctgaaacctctgtttggcgcaatgctggcggcaccctgttcgatgctcattatgcggctgtttttttcaccgacgcgctcattctggcaagagctggcatggttactaagcgcggtgttctggtgtgcgctgggggcactgtgtttcttatttatcagtagtttgtttaaaccacagcacagaaaaaatcagtaaagccctcaacgcgagggcttgtcagacgatcaggcgtccagattttctttcacccatgcagcaaaatcggtatagccgccgatatgttgctgatcgacaaaaatctgcggcacggtttctacgggtttacctgccttttgttgtagatcttctttagtgatcccttccgcacgaatatctacatactgatactgaaaatcatcgcgttcattgctcaatttctcagccagatcttttgcacgcacacagtaagggcaacccgaacgaccaaaaataacggtttgcattatttctctcctcatagatttatgcctgtaatgatcacgctaaaatgtattcgctgaaagtaggtttaacctgttgcattaattgctaaaagctataactgttaaacacaatacagtgaaaagttttagactgaaggctcactttgcagagggaagcgtatgcgcgcgatcggtaaattgcctaaaggcgtgttgatactggaatttatcggaatgatgctactggcggtggcgctgctgtcggtaagcgactccctgtcgctgcctgagccattttctcggccagaagtgcagattctgatgatttttctcggtgttttgctcatgcttcccgctgcggtggtggttattcttcaggtggcaaaacgtcttgccccacagctgatgaaccgtccaccgcaatattcacgttcagaaagagaaaaagataatgacgccaaccattgaacttatttgtggccatcgctccattcgccatttcactgatgaacccatttccgaagcgcagcgtgaggcgattattaacagcgcccgtgcgacgtccagttccagttttttgcagtgcagtagcattattcgcattaccgacaaagcgttacgtgaagaactggtgacgctgaccggcgggcaaaaacacgtagcgcaagcggcggagttctgggtgttctgtgccgactttaaccgccatttacagatctgtccggatgctcagctcggcctggcggaacaactgttgctcggtgtcgttgatacggcaatgatggcgcagaatgcattaatcgcagcggaatcgctgggattgggcggggtatatatcggcggcctgcgcaataatattgaagcggtgacgaaactgcttaaattaccgcagcatgttctgccgctgtttgggctgtgccttggctggcctgcggataatccggatcttaagccgcgtttaccggcctccattttggtgcatgaaaacagctatcaaccgctggataaaggcgcactggcgcagtatgacgagcaactggcggaatattacctcacccgtggcagcaataatcgccgggatacctggagcgatcatatccgccgaacaatcattaaagaaagccgcccatttattctggattatttgcacaaacagggttgggcgacgcgctaaaaccgccacgtcgatgtatgatacgcgggcttttgaccaggtctgacagagaggtgcagggtgaaaattgccatattgtcccgggatggaacgctctattcgtgtaagcggctgcgtgaagccgctatacagcgcggtcacctggttgaaattcttgatccgctttcttgctacatgaacataaatcctgcggcgtcttctattcactacaaaggccgcaagttaccccattttgacgcagtgatcccgcgtattggcaccgccattaccttttatgggacggcggcactgcgccagttcgagatgctggggagctatccgctcaatgagtcggtcgccattgcccgggcgcgtgacaaattgcgttccatgcaactgctggcgcgtcagggcatcgacctgcctgtcacgggcattgcgcattcgccggatgataccagcgatttaatcgacatggtcggtggtgcgccgctggtggtcaagttggttgaaggcacgcagggaattggcgtcgtgctggcggagacgcgtcaggcggcggaaagcgtgattgacgctttccgcggtctgaacgcgcatattctggtgcaggaatatatcaaagaggcgcaagggtgcgatatccgctgtctggttgttggcgatgaagtggtcgctgcgattgaacggcgggcgaaagagggcgattttcgttccaatttgcatcgtggcggcgcggcaagcgtcgccagtatcacaccacaggagcgtgaaatcgcgataaaagccgcgcgaacgatggcgctggacgttgctggtgtggatattctgcgtgctaatcgcgggccgttggtgatggaggtgaatgcgtcgccggggctggaaggaatagaaaaaaccaccggtatcgacatcgcgggtaaaatgatccgctggatcgaacgccacgctacgacagaatattgcctgaaaacgggtggttagtcgcaatcacattactgatcatggttttgcctgcgctttttgcgtaagctgtgccggtctttttatcgaaagaggttgtacaaaattatgacatcgctggtcgttcctggtctggatacgctgcgtcaatggctcgatgacctggggatgagtttttttgaatgtgataactgtcaggctctgcatctgccccatatgcagaatttcgacggtgtctttgatgccaaaatcgatctgatcgataacacgatcctgttttctgccatggcggaagtccgaccttcagccgtattgccgctggcggcggatttatctgccatcaatgccagttcgctgaccgtgaaagcatttcttgatatgcaggatgataatctgccaaagctggtggtttgccagtctttatccgttatgcagggcgtaacctatgagcagtttgcatggttcgtgcgtcagagcgaagagcagatttcgatggtcattcttgaagctaatgcccatcaactgctgttaccgactgatgatgaagggcaaaacaacgttaccgaaaactatttcctccactgataactcctttcgagcacgcagtcgctggtgcagtggctgcgcgctgcaaaattatctgctgtttttaaccttttcttaaagattatttcacttctcttgtgtcgatttggctttatcacatagagcaaatatgcataaaaatttgttaaataccgttttttaatccgagctatagtctcaaaccctggctaaagttattcttgcgatgcttttatatagcgagcagtgctggccgggagaaagttctcttttcttacaccgcgccgataaaaaatatgcacgtttattgcatatctttcagtgtgacaacttttgttcgtttgttaacgaactttcagaaggaaagagatatgaccgccttaaataaaaaatggctatcgggtctggttgcgggtgctctgatggccgtctctgtcggcacgctcgcggctgaacaaaaaacactccacatttataactggtctgattatatcgccccggacacggtggccaattttgaaaaagaaaccggtattaaagtcgtctacgatgttttcgactctaacgaagtactggaaggcaaattaatggccgggagtaccggctttgatctggtggttccatctgccagctttctggagcgccagttgactgcgggagttttccagccgctggacaaaagcaaattgccggagtggaagaatctcgacccggaactgctgaagctggtcgccaaacacgatcccgacaataaatttgctatgccctatatgtgggcgacgaccgggattggctataacgttgataaagttaaagcggtgctgggcgaaaacgcgcccgtcgatagctgggacttgatcctcaaacctgaaaatctggaaaaactgaaaagctgcggtgtctctttcctggatgcgccagaagaagtttttgctaccgtgttgaattatctcggcaaagatcccaacagcactaaagcggatgattacaccggaccggcaacagatctgctgttaaagctgcgcccgaacattcgttatttccattcatctcaatacattaacgacctggcaaacggcgatatttgcgtcgctatcggctgggcaggtgatgtctggcaggcgtcaaaccgcgcgaaggaagcgaagaatggcgtgaatgtctcgttctcgattccaaaagaaggggcgatggcgttctttgatgtattcgccatgcctgcggatgccaaaaacaaagacgaagcctatcagttcctgaattacctgctgcgcccggatgtagtagcgcatatttccgaccatgtgttctatgccaacgccaataaagcagccacgccgctggtgagtgcggaagtccgtgagaacccaggtatttatccgcctgcggatgttcgtgcgaagctgttcactctgaaagtgcaggatccgaaaatcgaccgtgtgcgcacccgcgcgtggaccaaagtgaagagcggaaaataatccgcagtcgtagatgccggaggggcgcaccacacccgccggcaattcgcaccattatggtgcgcttgcacacattcaatgccggagagcagccgtgaatgacgctatccctcgcccgcaggcgaaaacccgtaaggcgctgacgccgctattagaaatccgcaacctgaccaaatcctacgatggtcaacatgcggtggatgatgtcagcctgaccatctacaaaggtgaaatcttcgcgctgctgggcgcatccggctgtggcaagtccacgctgctgcgtatgctggcaggtttcgaacaaccttctgccggacagataatgcttgatggcgtcgatttgtcacaggttccgccttacctgcgccccatcaatatgatgtttcagtcttacgcgctgtttccgcatatgaccgtggaacagaacatcgcttttggcctgaaacaggacaaactaccgaaagcggaaattgccagccgggtcaatgagatgctcggcctggtgcatatgcaggagttcgccaaacgcaaaccgcatcagctttccggtggtcagcgacaacgtgtggccctggcccgaagccttgcgaagcgcccgaaactattactgctcgatgagccgatgggcgcgctggataaaaagctgcgtgacaggatgcagcttgaagtggtggatattctggagcgcgtcggtgtgacttgtgtgatggtcacccacgatcaggaagaggcgatgaccatggcggggcgcatcgccattatgaatcgtgggaaatttgtccagattggcgaaccggaagagatctacgagcatccgactacccgctatagcgccgaatttattggctcggtaaacgtctttgaaggcgtactcaaagagcgtcaggaagatggcctggtgcttgattcgccggggctggtgcatccactgaaagtcgacgcggatgcctcggtggtcgataacgtgccggtacatgtggcgctgcgcccggaaaaaatcatgctttgcgaagagccgcccgccaatggttgtaacttcgcggtgggggaggtgatacacattgcctatctcggcgatctttcggtgtatcacgttcgtctgaaaagtgggcagatgattagcgcccagctacaaaacgcccatcgtcatcgtaaagggttaccgacctggggcgacgaagtgcgtttgtgctgggaagtggacagctgtgtggtgctgacggtttaaggagcaaagatgagtacacttgaacctgctgcccagtcgaaaccgccgggcggatttaagctgtggttgtcgcagctgcaaatgaagcatgggcgcaaactggtcattgcgttgccatatatctggttgatcttgctgtttctgctgccatttctgattgtctttaaaataagcctggcggagatggcgcgcgctattccaccttataccgaactgatggagtgggctgacgggcaactgtccatcactcttaatctcggtaattttctgcaactgaccgacgatccgctctatttcgatgcttatctccagtcgctacaggtggctgcgatttcgacattttgctgtttactgatcggctatccgctggcgtgggcggtggcgcacagtaagccttcgacccgtaatattttattactactggtgatcctgccgtcgtggacctcgtttctgatccgcgtttatgcctggatgggaatattaaaaaacaacggtgtgctgaataattttctgctgtggctgggggttatcgatcaaccgctgaccattctgcataccaatctggccgtttatatcggcattgtttacgcttacgtgccgtttatggtactgccgatttataccgcgttgattcgtattgattattcgctggtggaagcagcgctggatctcggtgcacgaccgctgaaaacgttctttactgtgatcgtgccgctgactaaaggtgggattattgccggatcgatgctggtgtttatcccggctgtgggcgagtttgtgatcccggaactgctcggtggcccggacagcatcatgatcgggcgcgtgctatggcaagagtttttcaataaccgcgactggccggtggcctcggcggtagcgatcatcatgttgctgctgctaattgtgccgataatgtggttccacaaacaccagcaaaaaagcgtgggagaacacggatgaataatttaccggtagttcgttcgccctggcggattgtgattttgctgctgggctttacctttctctacgcgccaatgctgatgctggttatctattcgtttaacagctcgaagctggtgacggtgtgggccggctggtcaacgcgctggtatggtgagttattgcgcgatgacgcgatgatgagtgcggttggtttaagtctgacaattgcggcctgtgcggcgacggcggcggcgatcctcggaactattgcggcggtggtgctggtgcgctttggcaggtttcgcggatcaaatggctttgcctttatgatcaccgcgccgctggtaatgccagatgtcatcacgggcttgtcgctgttgttattattcgtcgcgcttgctcatgccattggctggcctgcggaccgcggtatgctcaccatctggctggcgcatgtcactttttgtacggcttatgtggcggtcgttatttcttcaagattgcgggaactggatcgctcgatagaagaagcagcgatggatctcggtgcgacgccgctgaaagtgtttttcgtcattacgctaccgatgatcatgcccgcgatcatttctggctggttactggcttttactttgtcgcttgatgatctggtgatcgccagctttgtttccgggccgggagccaccacgttaccgatgctggtcttttccagcgtgcggatgggggtgaatccggaaatcaacgccctggcaacattgatcctcggcgcggtcggaattgtcggatttatcgcctggtatctgatggctcgcgcagaaaaacagcggatacgcgacatccagcgtgcaagacgtggctgaagacactaaaatttgccaacctggctacataatgccgcgcatgtcgcggcattgttttcatggaagacgaaacgttgggattttttaagaaaacatcttcatctcatgctcgcctgaatgtgcctgcgctggtgcaggtggcggcgctcgccattattatgatccgtggcctcgacgtgctgatgattttcaatacgctgggcgtgcgcggtattggcgagttcattcatcgcagcgtacaaacctggagtttaacgctggtctttttaagcagtctggtgctggttttcattgagatctggtgtgcgttttcactggtgaaagggcgtcgctgggcgcgctggctatatctgctgacacaaatcaccgccgcaagttacttgtgggcggcttcgctggggtacggttatccggagctgttcagcattcccggtgaatcaaaacgtgaaatcttccatagcctgatgctgcagaagctgccggatatgctcatcctgatgctgctgttcgttccctcgaccagtcggcggttcttccagttgcaataatgtgtataatcgtcgcccctgatgatgtgaaggtcaatgtatgcagtgcgcactttacgacgcgggtcgctgtcgttcctgtcagtggataatgcagccgattccagagcaactctccgctaaaaccgccgatcttaaaaatctgctcgccgactttccggttgaggaatggtgcgcgccggtgtcaggcccggaacaagggtttcgtaataaagccaaaatggtggtgagtggtagcgttgaaaaaccactgctcggtatgctgcatcgcgatggcacaccagaagacctttgtgactgcccgctttatcctgcctcatttgcgcccgtttttgcggcgctaaaaccgtttatcgcccgagcggggttaacgccctacaacgtggcgcgtaagcgtggcgaactgaaatacattctgctgactgaaagccagagtgatggaggcatgatgctgcgctttgtactgcgttctgataccaagctggcgcaactgcgtaaggcgctgccgtggttacacgaacaactaccgcagctgaaagttattaccgtcaatattcagccggtacatatggcgattatggaaggggagacggagatctacctgaccgaacaacaggcactggcggagcgttttaatgacgtaccgctgtggatccgtccgcaaagtttcttccagactaatccggcggtcgccagccagttgtacgccaccgcgcgcgactgggtacgacagctgccggttaaacatatgtgggatctgttctgcggtgtggggggctttggtttacactgcgcgacgcctgacatgcagttaaccgggatcgaaattgcatcagaggccattgcctgtgcaaagcagtcagccgctgaactgggcttaacgcgtttgcaatttcaggcgctggactccactcagtttgccaccgctcagggggatgtgccggagctggtgctggttaacccgccgcgccgcggcattggtaaaccgctgtgtgattatctctcaacgatggcaccgcgttttatcatctactccagctgtaacgcccaaactatggcgaaagatatccgcgaactgcctgggtttcgtattgaacgggtgcagcttttcgatatgttcccgcataccgcgcactatgaagtgctgacgctgctggtgaagcaataaaaaagccgcatgtgcggcttcagattgctgacaaagtgcgcgttgtttatgccggatgcggcgtaaacgccttatccggcctacaaaagcgtgcaaattcaatacattgcatgggccatgtaggcctgataagcgtagcgcatcaggcaattttacctttgtcatcagtctcaagccgcggttgcggctttctgaatcttactgtgggaaccactggtcactgattttttgataagtaccgtcagctttaattgctgccagcgcgttattcagtttttccagcagggctttgttatccggacgtacagcgatgcccaggccggtgccaaaatattgcggatcggtcactttctcagtagcaacaccaagttgtggattggttttcagccattcgtttaccaccgctgtgtcaccaaataccccatcaatacgaccatttttcagatcgataaaggcattctgataactgtcataagagacagttttcacttccgggtgctgatcctgaatatatttctggtgcgtagtaccgttttccatcccaatacgtttgcctttcagatcggcaaacgttttgtaggtatcttttttggcaatcacgacggctgagttttcatagtagggcgtggtaaacgatacctgtttgctacgctccggggtgatatccataccggagattacggcgtcatattttctgaatttcagggacgggatcaggctgtcgaacgcgtgattagtaaaagtacattctgcctgcatttgtttgcacaaggcttttgccagatcgatatcaaagccgacaatctcattattagcacctatagattcaaagggtggataggtggctgaaacgccaaaattgattttctctgcggcagaagcaccgaaagtaaaggaagcaagtaaagcggcaagaactaactttttcatgatggaactcccgtctgtcaatcttatgatttttggccgtgtctgcggcatgggataacaatgccatcaagtgaatttatatgcaataaacatgattaaataatttaaatgaaataaaaaagacggacaacttagtgggttgtccgtcttcattataagaatttatgcactatgtaggccggataaggcgtccccgccgcatccggcacaggcaccgtgctgatgtctgatgcgacgctggcgcgtcttatcagacctacaaaaccccccggcgaatgtacgcagccacattaatttcgccgttcgaatgccagcgctttgcgctcgatcagacgcatcatcagcgtcagcaggccgttaacgaccaggtaaataatccctgccgcaccgaacaccattacatcgtaggtgcgtccgtacaacaactggctgtatcccatcacttccatcagcgtaatggtgtatgccagagaggtacttttgaataccagcaccacttcgttggaataagaagagagcgagcgtttaaaggcatacggcagcaggatcgccagcgtatcttttttgctcattcccagggcgctacaggactgccactgaccttccgggatcgcacgaattgcaccgtaaaacagctgcgtggtatacgccgcactattcagcgacaacgcaatcagcgcacataaccacggttctgacaacaaatgccacagtgccggatactcctgcaaagtcggaaactggcccggcccgtaataaatcaggaagatctgcaccagcagcggcgtaccggtaaacagcgtgatataaccccgcaccagccacaccagcaccggcgttttcagcgtcaggatgatggtaaaaatcaatgccagaatcagtgccacaatcagcgaggcaacggttagcgtcaggctggtgtgtagccctttcatcagttcgggtaaatactcaaacattagctgggcctccgctcaaaacgtgtcgcgcgcaggtcaatgcgtttgagaatgtactgactgagcagggtgatcaccaggtaaatcgccgccgccacaatgtaccaggtaaatggttcctgggtacgagtagcgatgctttttgtttgcagcattaaatcattcacactaatcaaactgaccagcgcggtatctttcagcagcaccagccactggttaccgaggccaggcagcgcatgacgccacatctgcggcatcaccagacggaaaaagatagccgatttcgacagccccagcgcctgaccagactcccactgacccaccggcaccgctttcaacgcgccccgaagcgtttgcgaggcataggcggcatacagcagtgacagagcgatgacaccacaaaggaacgggctaacgtcgaagttctcaatgtccatctgcactgggatctgcacgaacccaagattgatagtgaagccatccgaaagcgtcagcagcagctgcgaggagccaaaatagataaacagcaccaccagaatttctggcaggccacgcagaatggttaccagcgctgaacctgcccacgcgacaggacgccattttgccgactcccataccgcaaagaacatcgccagcgccagcccgacaatcaatgcacaaacggcaaggccgacggtcatcccggcggcgcttgctaaaggaaaaaattcattcatcaggaattacttctggaaccatttgttgtagatggtttcgtaagtgccatctttcttcactttttccagcgcagtgttgagtttctgctgcagctcagtgttgccctgacgtaccgcgatgccgaggccagtgccgaagtaatctttatcggtcactttgtcgcccaccgccgccagtttcgggttatctttcagccactcagtgaccactgcggtgtcaccgaagacgccgtcgatacgcccgttttgcagatccagttttgcgttctggtagctgtcatacggaacggtagtgatttccgggtgcttatccataatgaatttctggtgtgtcgtcccgttctgtacgccgacttttttgcctttcagctgatcaacactggtgtatttgccttgctgacccacaaacagggcagagttgtcatagtacggggtggtaaacagcacctgcttttcacgctccggagtgatatccatgcccgccatcacggcttctacgcgacggaatttcaggcttgggatcaggctgtcaaacgcctggttagagaaagtgcaggttgcatcaatctctttacacagcgcttgtgccaggtcgacgtcaaaaccaacgatctggttgtttgcatcaatcgattcaaacggaggataggaggcttcggtagcaaaacgaatggtttcggcagctgtggcggaaagactaaaacctgcaattaacgcggcaatcagaacttttttcattgttgttatcccgaatcttagtgagagagatagtttttaaatgcttcggtttgcggctcggtaaagcagctcgcgtcgccttgttctacgatatgaccattttccatatacaccactcggctggcggttttacgcgccacttcaacttcgtgggtgacgatcacctgggtaatattcgtttctgccagctcacgaatgatgctgacgatttgtgccgtaatttccgggtccagtgcggcggtcggttcatcgaacagcagtacctgcggttccatcatcaacgcacgggcaatagcaacacgctgctgctgaccaccagaaagatgcagcgggtaacgatcgctataaggtttgagacgcagacgttccagcagtttttctgcacgggccagcgcctgatctttactcaaccccagtacacggcagggcgcttcaatcaggttttgctgcacggtcagatgcggccacaggttgtattgctgaaacaccatgccaacgttacgacgcaaatcgcgaatcgctttgtcagagggtgttttggtgaaatcgaaatggttgcctgcaatgttgagcgtaccggagcgcggcatctcaagcagattgagtacacgcagcagcgagcttttacccgcgccgctggggccaagtaacaccagcgtttcgccctgtgggcaatccagcgtgatatcgaacagcgcctgatgcgcgccgtagaagcaattaatgccgtttaattgaatactcattgacactcgtatactggcagtctgatagctattgaggtcgaagatagtacctttgacagaataattatgcaatatttctgctttaaaagttaaaagcaaagcgcattattcaataaacatagcacaaaataacgggggcggtggtcggcgagcataaatgtcggcattcctcacgaaatgccggacaatttacggggtttattggttgatcaaggcgttagcgattctcgatggactgacggagcgtacccgccgtggcatgaacgctaccgcctaagtaacgcacatcgtcgatgacccaacactggccttcctgaatcattaacacttcatcctgccaaccctggtcaccctgtttgagatccacgcgcaatggaatgttacgggcatcacgattagggatagtcgatgcactggcaacgtgggcgctatctggcaaggtggttcgactggagaatggatcgttggtcagtagttcccgatggttattatcccgggaggcatcgctaagcagtgtcgccagtttgtcgctcagataagggcgcaaggcggtgatgtcgttgctgcggtgcaaaatgcggtagtcataaaattgctgggccacgttatccgggcctccttcaacgcaaggaccactgcgtgtgccgttatctttataagctggagtgactgtggtgcaggcactgaggagcagtgcgcaggggataagcattgtcaatttgctgtagcgcataatgatttccttataagcgatcgctctgaaagcgttctacgataataatgatatcctttcaataatagcgtatcagtctgataatgcttttgagatcgaaggcttagcaaacaaggagatcgatcatgcaattttctacaaccccaactctggaaggccagaccatcgttgaatattgcggtgtggtgaccggcgaagcgattttaggtgccaatattttccgtgatttctttgccggtatccgcgatatcgttggcggacgttccggtgcgtatgaaaaagaactgcgtaaagcacgggagatcgcctttgaggaattaggctcccaggcgcgggcgctgggggccgatgccgtcgtcggtattgatatcgactacgaaacggtcgggcaaaacggcagtatgctgatggttagcgtcagcggtacggcggtgaaaacgcgtcgatgagaagattcttctggctggtcgctgccgctctgttattggcagggtgtgcaggcgaaaaaggcattgtcgagaaagagggatatcagcttgatacccgacgccaggcgcaggcggcgtatccgcgcattaaagtgctggtgatccactacaccgcagatgattttgatagctcgctggcgacactgaccgataagcaggtcagctcgcattatctggtccctgcggtaccaccgcgatacaacggtaaaccgcgcatctggcaactggtgccggaacaagaactggcctggcatgcggggattagcgcctggcgcggggcaacgcgccttaacgacacctctattggcattgagctggaaaaccgtggctggcaaaaatcggccggagtgaaatattttgccccgtttgaaccggcacagattcaggcgcttattccactggcgaaagatattattgcccgttatcacatcaagccggaaaacgtagtggcacatgcggatatcgcaccgcagcgcaaagacgatccggggccattatttccctggcagcaactggcgcagcaggggattggtgcctggccggatgcgcagcgggttaacttttaccttgccgggcgcgcgccgcacacaccggtagataccgcgtcattgctggagcttttggcgcgctacggttatgacgttaaacctgatatgacaccgcgcgagcagcggcgcgtgattatggcattccagatgcatttccgcccgacgttatataacggcgaagcggatgcagaaactcaggcgattgccgaagcattgctggagaaatacgggcaggattagcgcggcagttttccgtggtcgcgtagccaggcggcagttttctcgataccttcatccagggtgatgaccggctgataacctaactcttcctgcgcacgcgtaatatccagcgtaaagtcaaaattcaacttggagacgccgtagtgggtcagcggcggctcttttgctgacttgcggcctaaacgctccatgctgcgggcgatcatatccagcatcgggtaggggacggaacgaatacgacagtcaatattcaactcgtcgatcagcttctgcacgatgctgcgcagtgtgcgatgctcgccgttggtgatgttgtacacacgcccggaaggtagcttatcgcaggcttcctggcttgccagccacattgcgtgcacggcattttcatagtaggtcatatcgaccagcgcactgccgccatgcggtaacagaatactgccgtagtggtgcatcatatgcgccagacggggaataaagactttatcgtgcggtccgaacagactttgtgggcgcagaatagtaaagcgcgtttgtggattcgcctgcgaaagcatattgatcacttcttcgctggctgctttgctgcgggcaaactcgttggcgaagcggtgagggcgaaaatcttctttaatatcgcgatggtggtgataatcgaagtacagggagggggaagagatatgaataaagttacgcacaccccaggcgacagcccattcacccaggcggcgagtggcgcgaacgttagccagatcgaaagcctgttgtgtcccccagggtgaggtaaagctggagcagtgccacagcgtatcaatgcccgcgagcatcactttagcttgtgatgaaaccagctcggtcagatccgccggaacaaactctgcgcccattttttccagcaatttgcccattgcctcgttgcgaccggtcgctcgcacgctgatgcctttctggcataaaaactctaccgcgtttcgacctaagccgctggtggcgccggtaaccagtaccttcatatcaatccactgttgttgagaaaataacgtgcgcattcttccgtgatttcccccatgatgcaatgggaaacatgaaagaataacgcaggttttgtcgattaatctgtgctttgttctgccagtctggcgatttgttttgccattccgcgaaaaataaacagatgcgcggggatcatcaataaccagtaaaacagccccggcataccgtgcggatgccagaaagcgcggacatcgatagtacgatagtcgcctttatcttccaggctaaaacacagtcgtcccagccccggcgctttcatgccaaataacaacgtaagttgtttttccggttcaacgacaatcactttccagctatccaccgcatcgccagtctgtaaatattcgcgctccgggcggcctttcgccagcttatgaccgatcgcgcggtccatcaacgcccgtgtctgccacaaaatattgccaaagaaataacgctctttaccgccgatttggttcactacctgccataaagcagcaaggctggcggacgttttaacggtaaaccccgcctgtttggcaaaataaccgtactccggtcgccagcgggcaaaggcctgagcgtcgtagccccagtcgctggagttgaccagtttttcctcctctttcaacgtgctacgtaccgcgtcatcgaaagcgatcagccgttgtgggatgagtgcacgtagcgcggtatcatccgccagcagatcgtgtttcagcccctgaatcaacgccctggcggtggtgggcggtacggaagtaatcacattgagaaaccacaccgaaatccagcgggtggggagggggatggggatcaaccagcggcgcttaccgctcaccgccataaaatgttcaaactgttgctgataactgagcacctctggtccggcggcttcgaagatgcggtgttcgctggccggatgatctaacaacgcaaccagatagtgcagcaagttttccagcgcaatgggcgtggtgcgtgaacgaacccagcgcggaggcgttaagactggcaggttgtagaccatatcgcgcatgacttcgaacgccgcggaacctgcgccaacgataattccggcccgcagttcggtcacgggtacattcgcttcacgcagaatgtccgccgtagcctgacgagcacgcagatgatccgactgctcatgtggcggggcctgcaacgaactaagaaagattaattgcttaactggtacttcacgtagcgcatcgcggacgttgagagccacctggcgctcctgagcgataaaatcgccgccttcgcccatgctgtgcaccagaaaatagaccgtatcgatatcctgcaacagggccggtaggttatccggccagctgagatcgactttatggcaactgacgtttgccagttgcagctttgcaagcctgtcgacatgacgtgccgccgccaggatctgatgcccttgctggctgagtgtgcgcaccagatgctgaccaatgtagccactggcaccgagaactaaaatgcgttgcggcacgtctctctccttaacgcgccaggaatgcacgccagtgggcggcgacttccgccagttgttcgcgcgagacgtcaagatgcgtcaccaggcggacaatcggcgaggcgttaatcagcacgtttctcgctttcatgtattcgcctaacgcggcagcattttcttccccgacgcgaacaaacagcatattggtgtcctgacgcatcacatccgcgcctgcttcacgcagctgctccgccatccaggcagcgttgtcgtggtcttcctgcaagcgcgcaacgttatttttcagggcatatatcccggcggcagccagaatgccggactggcgcatcccgccacctgtcattttccgccagcgaatggcacgtttaatgtaatcacgattaccgacgagtaatgaaccgactggcgtcccaagacctttcgacaggcaaatggtgaacgaatcacaatattgcgtgatctctttcagttcgcagccgtaagccaccacggcattaaagatgcgcgcaccgtcaacatgcagcgccagattgcgctcgcgggtaaattcccatgcttctttcaggtattcccgcggcaacactttgccgttgtgggtgttttccagactgagtaatttggtgcgggcgaaatggatatcgtcgggtttgattttcatcgccactttatccagcggtagcgtgccgtcggcagccgcgtctatgggttgcggttgaatactgcccagcaccgccgcgccaccggcttcaaacagatagttatgcgcggcctgaccgacaatatactcttcgccgcgttcgcagtgactgagcagagcgaccaggttggcctgagtgccggtaggcagaaaaatggcggcttctttaccggaaagctctgctgcgtagtcctgcagagcattaacggtagggtcgtctccgtaaacgtcgtccccaaccggggcggccatcatcgcttcgagcatggcgcggcttggtcgggtaacggtatcactgcgtaaatcaatcatggcatgtccttattatgacgggaaatgccaccctttttaccttagccagtttgttttcgccagttcgatcacttcatcaccgcgtccgctgatgattgcgcgcagcatatacaggctgaaacctttggcctgttcgagtttgatctgcggtggaatggctaactcttctttggcgaccaccacatccaccaacaccggaccgtcgatggagaaggcgcgttgcagggcttcatcaacttcagacgctttttctacacggatacccgtaatgccgcacgcttcggcaatgcgggcaaagtttgtgtcgtgtagttcggtgccgtcagtcaaatagccaccagctttcatctccatcgccacaaagcccagcacgctgttgttaaagacgacaattttcactggcagtttcatctgcactactgagaggaaatcgcccatcaacatgctaaaaccgccatcgccgcacatggcgaccacctgacgttctggctctgtcgcctgcgcacccagcgcctgcggcatggcgttagccatcgaaccgtggttaaacgaacctaacaggcgacgcttgccgttcatttttagataacgtgccgcccacaccgttggcgtaccaacgtcacaggtgaaaatagcgtcatcggcggcaaaatgactaatttgctgcgccagatattgcgggtgaatggctttctcgctcggtttagctaaatcgtccagccctttgcgggcgtcgcggtaatcttccagcgctttatccagaaacttgcgatcggctttttcttccaccaatggaagcaatgcacgcagagtcgacttgatatcgccgaccagtgccatatccaccttgctgtgagcgccgatgctggctgggttgatatcaatctgaatgattttggcatcggtcgggtagaaggcgcggtagggaaattgcgtgccgagtagcactaacgtgtcggcgttcatcatggtatggaaacctgacgagaagccgattaacccggtcattccaacatcatacggattatcgtattcgacatgttctttaccgcgcagggcatgaacaataggcgctttaattttcccggcaaactcaactaactctttatgcgcccccgcgcagccgctgccacacatcagggcgatattgctggaataacgcagcagttgcgccagtttgcgtaactcttcttcttccggcgtcacgactggttgtggcgcatgataccagtgcatggttgccccttctggcgcaggttttaacgccacgtcgcctggtaacacgacaaccgaaacgccacggttaagcaccgctttgcgcatggcaatcgccagtacttgtgggatctgctccgggctggaaaccagctcgcaatagtgactacattcgcggaatagctcttgtgggtgggtttcctggaaatagccgctgccaatttcgctggagggaatatgagcggcaatcgccagtaccggaacgtgattgcggtggcaatcgaacaggccgttgattaagtgcaggttgccggggccgcacgatccggcgcagaccgccagttctccgctaagttgtgcttcagcgccagcggcaaaggccgccacttcttcgtggcgggtggacatccactcgatggtgcccatgcgattaagactgtcactaagaccgttcagagagtcgcctgtgactccccagatgcgtttcacccctgccgattcgagtgttttggcgatataagctgcaaccgtttgtttcatggttctccatctcctgaatgtgataacggtaacaagtttagttcatctgacggagggggaagggatgggagagaaaggaggcactaacggttaaatagcccgatgaaaggaatatcatcgggcataaggcgattatgcgagaaccaaatccccctgcggatggcaggagcaggccagtacgtaaccttcagcgatttcggcgtcggtcagcgtcattgtgctgctcaccgtatattcaccggaaaccacttttgtcttacagcagccgcaaacacccgcacggcaggcagcgacaaccggaacgttattgctttccagcgcctccagtagcgtggtgccaaccggggcgtaaaattctcgtgccggttgcagtttggtgaatttcagaccgctggtcgccgcttctgctactggggtgaagaatttctctttaaagaaacgcgtcacgccgagcgctttcacttcctgctctacccaatccatatacggagccgggccgcaggtcatcacggtacgtgaagctaagtcaggtacacctgccagcagttcgcgagtgagacgaccagcgataaagccttcggtaacgttattttctgccaccagcgttaccggatagttacgccactcatcggcgaaaataacatcctgcggcgtacgcacgttgtagatcacccgcacatcggcctgtggacggttcttcgcaagccagcgacgcatcgacataatcggcgtgacgccgcagcctgccgccagcaacaggaatttatcttctgctttatcgtcgcaggtaaattcccccatcgcgtccgaaagccagagataatcaccgcgttttacatcgcgcgtcagccactgggagccgacaccgtcatcaatccgccgcacggtcagggtgatatattcactcacgcctggcgtggaggaaatggtgtaagcacgcagcgtttccgctgagtttcgcacgctgaccagtgcatattgcccggcgcgatatgggtagtaatcgtggcaaatcagggaaatcgtccacacatccggcgtttcttgcgtaatgtgatgaacctgcatccgccacgggcattgattcgttggcatcgtcatcgacaaactccttacgcgctcaacagttgcttcatgtcttcttcaacagtggtgatagaacgcaggccgaatttctcgttcagcaccgccagcaggtctggtgtcaggaaaccaggtgcagtcgggccggtgacgatatttttcacgcccagagaaagcagcgtcagcagaatgacgatcgctttctgttcaaaccaggagagcaccagcgacagcggcagatcgttgacaccgcagcccagtttctctgccagagtgacagccagaataatcgctgagtaagcatcgttacattgacctgcatctaccagacgcggcagaccttcgatatcgccaaactcaagtttgttaaagcgatatttaccacaggcgagggtcaggatcaggcagtcatccggcacgctggtggcgaaatcggtgaagtagtggcgctcgccgcgtgcgccgtcacagccaccaagcaggaagatatgacgcagtttttcacggctcaccagatcaatcagcgtatcagcagcgccaagcagcgtctggcgaccaaaacccacggtgataaggtgcggaatttcgctgtacgggaagcctgccatctgttgcgcctgggtgataaccgcagagaaatcatcaccgtccagatgacgcacgccaggccagccaacaatgctgcgggtccagatacgatcgtcataagcgcctacggttgggtcgatgatgcagttcgaggtcatcacgatggggccagggaaacgagcgaactccacttgctgattctgccagccgctgccgtagttaccgaccagatgcttgaatttacgcagctccgggtagccatgcgcaggcagcatttcgccgtgggtgtagacattaacgcccgtgccttcggtctgttccagcaggttgtagagatctttgagatcgtgaccggaaatcagaatgcatttacccgccgtcgctttgacgttgacctgggttggcgtcgggtgaccgtatttaccggtttcgcctgcatccagaatgctcatcactttgaagttcatctggccgatttccattgaacactcaagaagcgcgttcatatcggcaggccaggtccccagccacgccatgattttatggtactgggcataaatatcgttgtcgtattgaccgagaacatgcgcgtgttccatataggccgccgcacctttcaggccatacaggcacagcagacgcaggccgagaatgttttcgccaatcgccgctttatctttgttaggggtaaattctgctgcctgacgttgcagctcgccgagatcgtcgctcaccagttgcaggtcagccatcgggttatcgacgcgcgcgttggcatctacagccaggcattgcgctttcagcgcctcgcgcagggcaatcgcttcacgagcgtagccgacaatacgcggagaatcgaagttaacgttggtcagggttgagaaaaaggcacgtggcgcgaagctgtcaacatcgtggttgatgatgccgtattcacgcgcttttaccgcccaggcagaaagcccttgcagcgccgcgatgagtaaatcctgaaggtcagaagtttccgccgttttaccacacatcccctgcgcgtatgagcagccgtttcctgccggagtacggatagtttgttcacattgcacacaaaacatgatcacaccttttaaagttatatttaatatacatgtttaaggttaagacgcttaacgcggggataaaagggatttttcatgcaactttaagggagattgatttagcgcaattttggcggcagggatctaccgccagagaggtattacgcagagaaaaaggcgatgaggatcggcactaacaggctaagaataaaaccgtgaacaattgccgccgggaccatatccagcccgccagtacgttgaagaacgggcagggtgaaatccattgatgtggcaccgcataagcccagtgcagtagagcggctgcggcgaatcagcccagggatcaacataatagcaatcagttcacgggccagatcattaaaaaacgccgcgctcccgattaccggaccaaaagattcggtcaataaaataccggaaagagaataccagccgaaaccggaggccattgccagcgcggtattgatggggagatcaagaataaaggcgttaattaaaccaccaattaatgaactgacaaccaccaccacggcgacaatcattccccggcgattaaggacaatctgctttaaggtcatgccattattgcgcaactgaataccaacgaggaaaagtagcaaaattaacgtgtattcactggcttcggtcgcgtgttgtaagaaagccagtccacttagaccaatggcaaaaccaatcactactacgccgcacagttttagcgactccagcgccatcgcaatacgcgacgggagtttttcttgctgatggtggttgcgccacggcaggcctcgctccagccacatcagggcggcaatattacacagtaaaataacggtaatactgacggcagaataatgcagaatcgccaacaggttactggcgaggttatcgagaaacgccagactgatacccataaaaaagagaataaggtaaaccatccagcttaatagctgattaataacttttaacgcagcttgttggcgaagcggaatgaggtaacccacaatcaggggaaccagaatgattaacagcccagaaaacatgaaaacccagtccttgcaaagatgaagtcgaaatgcgcgatgacacactactgaaagcggaaggacgagtaaagttgcaattaaaaggaaatgttatgcataaggagcagtagagtattcgttttcatttaaagatattcttgcgctttaattacaaactgcaccgatgttggtggcgtcaaaatcgccgaggcgttccctgaaggccggggcagcccacatggatgtgggctgagggcgcgttttacagggatgttacctcgcgcccgacccggtagccgtaagggataagtcgagggcaccgcgcagcggcgattttgttcgccagagcccgggggtgcagggggcggcggcgattggccgccccctgcgcgctccttgcgccagtggcaatatgttgcttagctcatgaaaggagcgcaacaagatgatgaatcaacatataacaacatcttaaaaaaaggcctgacattacgccaggccttctgcgttaattaatcacgcttttccagcagggtccggtaaatcagaccaccgataatgccgccgacaattggcaccacccagaagaaccacagttgttctaatgcccagccgccctggaagatagcaaccgcggtgctgcgcgccgggttaacagaagtgttagtcaccggaatactaattaagtgaatcagggttaaggccagaccaatagcgatcggcgcaaaacctgccggcgcgaatttgtcggttgcgccgtggatcaccaacaggaaacctgcactcaataccagttcaactaccagcgcggaaagcatggaataaccgcctggtgaatgctcgccataaccgttagaagcaaaaccgctggctgccgcgtcaaaacccgttttaccactggcaattaaatacagcagcgccgctgcaacaataccgccgacaacctgggcaattacgtagccaacgacttcttttgccggaaaacgtccgccagcccataaaccaatagtgaccgccgggttaaaatgaccaccagaaatatgaccaacagcaaaggccatcgtcagaacggtcagaccgaacgccaacgccacgccggcaaaaccaatgcctaattccgggaagcctgcggccagtacagcactaccacagccaccaaaaacaagccagaaagtaccaaaacattcagctgctaattttctgaacatatccaccacaattaaaaattgaccctgtgaaaaatatggtcgttttatagggtcgtcgtaaaaaagtgacgacggaaataatgcgcggctattttaaaaacgaaggcgagtcattcaccagataaataaatccagtaaatttgatttagggcaacagcgggttgccccatatagtcatttgtctgattgacagtgtagtgcacgcaaaagatttaatcctttaggcgtaataaaaaataatttatcatgctaattatttgattttgttgtttttgcagacttatcagcaagagggagtataacgcgattattcgctcatttttcagacatttgccatgcttaaatgtgatgtcatcacgtattagcaaggcctttcccgttatactgccagcgtaaaggataagtcacatatttctggaggggatatgattcttgagcgcgttgaaattgtgggttttcgcggtatcaaccgtttgtcgttgatgctggaacaaaacaacgtcctgattggggagaacgcgtggggtaaatccagcttgctggacgccttaactctgctgctatcgccagaatcagatctctaccattttgagcgcgacgatttctggttcccgccgggagatatcaacgggcgagaacatcatctgcatattattttgaccttccgcgaatcgctgccaggccgacatcgggttcgccgttatcggccgctggaagcgtgctggacgccatgcaccgatggctatcaccgtattttttatcgtctggaaggggagagtgcggaagacggcagcgtgatgacactgcgcagttttctcgataaagacggacatccgattgatgtcgaggatattaacgatcaggcacgccatctggtgcgtttaatgccggtgctgcgcttgcgtgatgcccgttttatgcgccgtattcgtaacggcacggtgccaaatgtccctaatgtggaagtcaccgcgcgccagctcgatttcctcgcccgtgagttatcctcacatccgcaaaatctctctgatgggcagattcgtcagggactttccgcaatggtacagctgcttgagcattatttctctgagcagggggccggacaggcgcgatatcgtttaatgcggcggcgagccagcaatgagcaacgaagctggcgctatctggatatcatcaaccggatgattgaccgacctggtgggcgctcgtatcgggttattttgctcggcctatttgctactttgttgcaggcaaaaggcacattgcgactggataaagacgcccgtccattgttgctgatcgaagatccagaaacccgtttacaccccattatgctttcagttgcctggcatctgttgaatcttctgccattgcagcgcattgccaccaccaactcgggtgagttgctttcgttaacgccggtagagcatgtttgccgactggtacgtgagtcctcgcgcgttgccgcctggcgtctggggccgagtggcttgagtaccgaagatagccgacgcatatcctttcacattcgttttaaccgtccgtcatcgctgtttgcacgctgctggttgctggtggaaggggaaacggaaacctgggttatcaatgaactggcgcgtcagtgcggacatcattttgatgccgaagggatcaaggtcattgagtttgcccagtccgggctaaagccactggttaaatttgcccgccgaatggggattgaatggcatgtactggtcgatggcgatgaagcagggaagaaatatgccgctacggtacgcagcctgttgaataacgatcgggaagccgaacgagaacatttaacggcgttaccggcgctggatatggaacattttatgtatcgccagggattttccgatgtgttccaccgcatggcgcaaatcccggaaaatgtaccgataaatctacgcaaaattatctcgaaagcgatccatcgctcttccaaacccgatcttgccattgaagtggcaatggaggcaggacgtcgtggtgtggactccgtaccgacgctgctgaaaaaaatgttctcacgcgtgctgtggctggcgcgcggtcgcgcggattaaccgcgaaacatcgtggccatttgtggctgaatagcgtcgagcatctcatagcgccgacggtattcagcccgttttttactggcgatttcggcaatctcttttcgtgctatctgtgctggaaggcggtaatggcgttcagcatcacatacgccgccaaccgattcccagaaagcgttgtaatcagcgtggatcttgccttctttatcgcgataacgcaggctgcggtaaatatgcgtttcattgctgacggcaataatctgctctacctgcaaacgttgggcaaacagacaggccgcttccatcacgaggcgtttgggaaatagcccgtggcaggctttcgtcgcattctggatttcctgatgtggaatttcccattttgcgccttgcagtccgccaataaacatcgttcttttcccctgatattcacacagggtaaacgtgatctctgccagaggaataccttcgctgttgcggaacaggattgtgctgtcaccttctttatccattgagatcatcatggtcagctcaagcgtgaactgctcgccgtttttgccttccagcttcgccagttgcagcccgggggtattcaaatataagctgaattcttccgccgacatacattcgcggagtaacgcataatggtaacgtaacgcctccagcaattgcttacggctaagattcgccgcaaggtaagggcgatgcagacgcacaggcagtcgcggctggcgcgttaacaatacattgagattaggccagtgggaaagttcgttcatccactcaacgcttaaacgcggcataatcaacgagcgcagcaaaaatttctggcgaaaactacggcgatgccagaatttacccggccgacactgtccacgtgccagactaagaaaaagtgacaggctgctgagagattcagatggcgtaaaggtccgttcagttagctgcgacatattcatgaaatcaatggttatacatggcgtcgatttcaccattgcgtatcttaaccaaacatcaatagtgtgattactaacgtaaattttagggttttgttgatatttcgttgaagttaatgacccggattggcatatggagtattcagaaaatttatgaaaaagcggaaaaccgtgaagaagcgttacgttattgcgctggtgatagtcatcgccggactgattacgttatggagaattcttaacgcacccgtgccgacttatcagacgctgattgtgcgccccggtgatttacagcaaagcgtgctggcgaccggaaagctggacgcgctgcgtaaggttgatgtgggcgcgcaggtcagcggtcagttgaaaactctgtcggtggcgattggcgataaagtaaaaaaagaccagcttttaggggttattgatcctgaacaggctgaaaaccagattaaggaggtcgaagcaacgctgatggagctacgtgcgcagcggcagcaggcggaagcggagctgaaactggcgcgggtgacgtattcccgtcagcaacgtctggcacaaacgaaggctgtttcacagcaggatctcgacaccgccgcgacggagatggctgtgaaacaggcgcaaattggcaccattgacgcgcaaatcaagcgcaatcaggcttctctcgatacggctaaaaccaatctcgattacactcgcatcgttgccccgatggccggggaagtcacgcaaatcaccactctgcaaggccagacggtgattgccgcacaacaagcaccgaacattctgacgctggcagatatgagcgccatgctggtaaaagcgcaggtttctgaagcggatgtaatccacctgaagccggggcaaaaagcctggtttacggtgcttggcgatccactgacgcgctacgaggggcaaatcaaggatgtactaccgacgccggaaaaggttaacgacgctattttctattacgcccgttttgaagtccccaaccccaatggtttgctgcggctggatatgactgcgcaagtgcatattcagctcaccgatgtgaaaaatgtgctgacgatccctctgtcggcgttaggcgatccggttggcgataatcgttataaagtcaaattgttgcgtaatggtgaaacacgcgagcgtgaagtgacgattggcgcacgtaacgataccgatgttgagattgtcaaagggcttgaagcgggcgatgaagtggtgattggtgaggccaaaccaggagctgcacaatgacgcctttgctcgaattaaaggatattcgtcgcagctatcctgccggtgatgagcaggttgaggtgctgaagggcatcagcctcgatatttatgcgggtgagatggtcgcgattgttggcgcttcgggttccggtaaatcgaccctgatgaatattctcggctgtctggataaggccaccagcggcacctatcgcgtcgccggtcaggatgttgccacgctggacgccgatgcgctggcgcaactgcgccgcgagcatttcggctttattttccagcgttaccatttgctttcgcatttaaccgccgagcagaacgttgaagtacccgccgtctatgctggtcttgagcggaaacagcgactgcttcgtgcccaggagttgctgcaacggctggggctggaagaccgtacagagtattatccggcacagctttcgggtggtcagcaacagcgcgtcagcatcgcgcgggcattgatgaacggtggtcaggtaattcttgccgatgaaccaaccggcgcactggacagccattctggcgaagaggtgatggcgatcctgcatcagctgcgcgatcgtgggcatacggtgattatcgtcacccacgatccgcaggtcgctgctcaggccgagcgggtgatcgaaattcgcgacggcgaaattgtgcgcaatcctcccgccattgaaaaagtgaatgttactggcgggacggaacctgttgtcaacacggtgtctggctggcggcagtttgtcagcggttttaacgaggcgctgacgatggcatggcgggcgctggcagcgaataaaatgcgtactttactgaccatgctggggattattatcggtattgcgtcggtggtttccattgtcgtggtgggtgacgccgccaaacaaatggtgctggcggatattcgttctattggtacgaatactattgatgtctatcccgggaaagattttggcgatgacgatccgcaatatcagcaggcgctgaagtacgacgacttaatcgccatccaaaaacaaccgtgggtcgcctcagccacacctgccgtctcgcaaaacctgcgcctgcgttataacaatgttgatgttgctgccagtgccaatggcgtgagcggcgattattttaatgtctatggcatgaccttcagtgaaggaaacacctttaatcaggagcagctgaacggtcgtgcgcaggtcgtggttctcgacagtaatactcgccgccagcttttcccccataaagcagatgtggttggcgaggtgattctggtcggcaatatgcccgccagagtcattggtgtggcggaagaaaaacagtcgatgtttggtagcagtaaagtgctgcgtgtctggctaccttacagcacgatgtccgggcgagttatgggccagtcgtggcttaactccattactgtcagggtgaaagaaggatttgacagcgccgaggcggaacagcaactcacgcgtttactttcactgcgccacggaaagaaggatttctttacctggaacatggacggcgtcttgaaaactgttgaaaagaccacacgtactttacaactgtttctgacgctggtggcggtgatttcgctggtggtgggcggtattggtgtaatgaatattatgctggtgtcagtgaccgagcggacgcgggaaattggcattcgcatggctgtaggtgcgcgagcaagcgatgttttgcaacagttcctgatcgaagccgtactggtttgcctggtcggtggcgcgttgggaataacactgtcactgttaattgctttcaccttgcagcttttcttacccggctgggagattggtttttcaccgttggcgctgctgctggcgtttctctgctcgacggtcaccgggattttatttggctggttacccgcacgaaatgcggcacgactggatccagtagatgctctggcacgagagtaatttttgagataaaaatgccagccgatcgggctggcattttgcctttaggatgtacacaatgagacagaagagctatgcgactgccgcttctacttcgacgggcacaataacactggcgtgattgccttttggcccctggtggacatcaaactgaacggattgtccagcttttagcgttctgtaaccatccatctgaatggtggaataatgagcgaaaatatcttcgccgccgccttcagggcagatgaaaccaaaccctttggcattgttgaaccacttaacagtacccttttccatgcttcgacatccttcgcaaatcttatacaagtaagatggaataaaccggggtcagagagggggctgttcaaaacctcgccaactctagaaatacaatttagagaattagggcgagccgtcaagcatttgacaggggacaaggggcaggtatgaatcaaaaatttgaagcagttaacgctattgacaggaatgtgacagatgtcgctgatgccaacgatagatgatagttatctatcatgtggagtagattggtcaggcaaataagctcttgtcagcggcagggcgttctgccgataaccgtaaccgaagatgataactgacaatgggtaaaacgaacgactggctggactttgatcaactggcggaagaaaaagttcgcgacgcgctaaaaccgccatctatgtataaagtgatattagtcaatgatgattacactccgatggagtttgttattgacgtgttacaaaaattcttttcttatgatgtagaacgtgcaacgcaattgatgctcgctgttcactaccaggggaaggccatttgcggagtctttaccgccgaggttgcagaaaccaaagtggcgatggtgaacaagtacgcgagggagaatgagcatccattgctgtgtacgctagaaaaagcctgaatgcaggcataaaaattgggggaggtgcctatgctcaatcaagaactggaactcagtttaaatatggctttcgccagagcgcgcgagcaccgtcatgagtttatgaccgtcgagcacttgttactggcgctgctcagtaacccatctgcccgggaggcgctggaagcgtgttctgtggatttggttgcgctccgtcaggaactggaagcctttattgaacaaaccacacccgttctgcctgccagtgaagaggagcgcgacacacagccgacgctgagttttcagcgtgtactgcaacgtgcggtcttccatgtccagtcctccggtcgcaatgaggttaccggtgcaaacgttctggtcgctatctttagcgaacaggagtcgcaggcggcatatctgttgcgtaaacatgaagtcagccgtctcgatgtggtgaactttatctctcatggcacgcgtaaagacgagccgacacagtcttctgatcctggcagccagccaaacagcgaagaacaagctggtggggaggaacgtatggagaatttcacgacgaacctgaatcagcttgcgcgcgtgggcggaatcgacccactgattggtcgtgagaaggagctggagcgtgctattcaggttctctgccgtcgccgtaaaaacaacccgctgctggtgggggaatctggtgtcggtaaaaccgcgattgcggaaggtcttgcctggcgaattgttcagggcgatgtgccggaagtgatggctgactgtacgatttactctctcgatatcggttctctgttagcgggcacaaaatatcgcggcgactttgaaaaacgttttaaagcgttgctcaagcagctggagcaggacactaacagcatcctgtttattgatgagatccacaccattatcggtgcgggtgcagcgtctggtggtcaggtcgatgcggctaacctaatcaaaccgttgctctccagcggtaaaattcgtgtaattggttcgacaacctatcaggagttcagcaacattttcgagaaagaccgtgctctggcgcgtcgcttccagaaaattgatattactgaaccgtcgatcgaagaaactgttcaaatcatcaatggcctgaaaccgaagtatgaagcgcaccacgacgtgcgttataccgcaaaagcggtgcgtgcggcggtagagctggcggtgaaatacattaacgatcgtcatctgccggataaagccattgatgttatcgacgaagcgggcgctcgcgcacgcctgatgccggtaagcaaacgcaagaaaaccgttaatgtggcggatattgagtccgtggtggcccgtattgcacgcattccagagaagagtgtttctcagagtgatcgtgataccctgaaaaacctcggcgatcgcttgaaaatgctggtcttcggtcaggataaagccattgaggcgctgactgaagccattaagatggcgcgtgcaggtttaggtcacgaacataaaccggttggttcgttcctgtttgccggccctaccggggtcgggaaaacagaggtgacggtacagctttcgaaagctttgggcattgagcttctgcgctttgatatgtccgagtatatggaacgccataccgtcagccgtcttattggtgcgcctccgggatacgttggttttgatcagggcggtttgctgactgatgcggtcatcaagcatccacatgcggtgctgctgctggacgaaatcgagaaagcgcacccggacgtgttcaatattctgttgcaggtgatggataacggtacgctgaccgataacaacggacgcaaagcagacttccgtaacgtggtgctggtgatgaccaccaacgccggggtacgggaaactgagcgcaaatccattggtcttatccaccaggataacagcaccgatgcgatggaagagatcaagaagatctttacaccggaattccgtaaccgtctcgacaacattatctggtttgatcatctgtcaaccgacgtgatccatcaggtggtggataaattcatcgtcgagttgcaggttcagctggatcagaaaggtgtttctctggaagtgagccaggaagcgcgtaactggctggccgagaaaggttacgaccgggcaatgggcgctcgtccgatggcgcgtgtcatccaggacaacctgaaaaaaccgctcgccaacgaactgctgtttggttcgctggtggacggcggtcaggtcaccgtcgcgctggataaagagaaaaatgagctgacttacggattccagagtgcacaaaagcacaaggcggaagcagcgcattaatctgattgttaggtaggttggtcaagtccgtaatctcgaaagaggttacggactttttgtttatggggtggaggaggttcagaccctttttttaatgatgatggtaagttgttgataattagtgctgcgggaaggtaaggataaaaaagggtgctgcaggagaatgggatggttttgctttattaacaacgggctaaacgtgtagtatttgagttcactgccgtacaggcagcttagaaattcacaggtaacatactccacccgcccaccatgttcactgccgtacagacagataaaatgcgaaaaaaaagctcgcactttcgtacgagctcttctttaaatatggcggtgagggggggattcgaacccccgatacgttgccgtatacacactttccaggcgtgctccttcagccactcggacacctcaccaaattgttttgctaccaaacctcatgggtggcaacggggcgctactatagggagttggagtaaaacggtcaagaagaattttaatgataattattgtttgctcatactgtaaacaagttgtgcagtatatctacatcgagacaagttacggacttatacttccaaagtacttcatacatatcacaaaataaaaaggccggttaaaccgaccttttactcgttctttctcttcgcccatcaggcggtaaaacaatcagcgactacggaagacaatgcggcctttgctcaggtcgtacggggtcagttcaacagtcactttgtcgcccgtcaggatgcggatgtagtttttgcgcattttaccggagatgtgtgcagtaaccacgtgaccgttttctaactctacgcggaacatggtattaggcaacgtttcaagaacggtaccttgcatttcaatattgtcttctttggccatctaatcctctggggtatcactaccgtaatttgaaccggcaagataatgccgaagttctgtaaataagtaaagatttgcgcgctaaatcgcaacaaacaggttcggcacattactccgaaaacacacggctaagccgcaccaaaagcgcaacgtataagggagcggtgagataaacgatgggcgttacctgacgcgaaaaattccttatcggcagcggggtaatgagcgtaaccaactctgcgaccgcaattataacactctggggagaaatgtgccgaaaacattcattcttgtggtgaaaacaagcatcgtggtacccagaaattattcggcaatcgtccgaggcgcatttgattgagataattaaggtaatcccggcggggaatttcgcaggcaccaagcgatgctgtgtgatcgttaaggacctggcagtcgataagcttaccgccatgaccgataaattcctcacagaataccagaagcgccgttttagacgcattttccatccggctgaacatggactcgccacaaaatagcgttccctgggccacgccgtacataccgccgacaagctcatcttcacgccagacttcaatggagtgggcatggccgagttcgtgaaggcgatggtaggcttcgaccacgccacgcgtgatccaggttccttcttcgcgatcgctggcacagccttcaatgacctgaccaaaagcgtaattcatcgtgacacgatagggcgagcgtttatgaaatcgcttcatactacggctgatatgcagtgattctggccatagcaccgcgcggggatcgggcgaccaccagaggatggggtcgcctggagaaaaccacggaaaaataccacgctggtaagccattaacaggcgcgcagggctaagatcgcccccaagtgccagcaggccgttaggctcacgtaatgcgccttccggggaagggaaggctattgaatggcgagaaagctgaaccaggcgcatgaccgcaaaactccacgcaagtcggatcgttcaataatagcttacaaaccctgcttgaactggtaataacgcccctgtctggcaagcagttctgcgtgagtaccttgctcaataatttgcccgttgtccatcactattatttgttggaaacgagagagtccgcgaagtcgatgggtgaccattaacaccgttttctcacgcatcatttctgcaagcaattcaaggatctggctttcggttgtggcatctaagccttcggtaggttcatccagcaacaccagtggcgcatcatgtaacagcgcacgggcgatagccagacggcgcagttcaccaccggagagctggcgtccgccttcacctaaccaactgttgagacctgcatcctcgagcagcttttccaggccaacgcgacgcaagatctccgacagagcctcatcactactgccaggcgaggcgagtaaaagattatcacgcagcgtggcgctaaacagatgcactcgctgaggaacaacgctgatggtctgtcgtagagccgcttcattcaggctggctatggggctatcgttaagcaaaatctcgccctgttgcgggtcccatgcgcgggtcagctgttgtaacagtgttgatttgccgcatccggttcgcccgagaatcgctatatgttccccggcgtttacctgaagagaaatccctttaagtgcctgttgagattgctccggataagtgaactgaacatcccgtaacgtcagcgaaacgcgatcggcaacacgagtttgggtatcaggaaaggtgacctccggtttttgatccgttaagtcagagatacgtacggcagaggcaatgacttgccccagatgctgaaatgcacccgttactggtgccagtgcttcaaacgcggctaacgcgcagaagacaaacagggcaattaacgcgccgggttgagcattgccgccaacgccgccagacgccatccacagcatcaggatcaccgctaacgcgccaatgagcagcattatcgcttgcgacaatgcggtcagttcagattgacggcgttgcgcttccagccattgaatttctgtattctctagttgcgtgcgataacgatcgctggcaccaaaaatggtcagctcagcttgcccttgcagccaggccgtcagttgttggcgatactgtccgcgaagatgagtcagattttgcccggtgctttttcccgcacgataaaacagcggtggcatcaggaaaagcgtcagtaacataatgccgcccagcgtaaaggcgagggtgaaatcaaggaaacttaacccgattgtcaccaccataatcaccacaaaagcgcccaccagcggcgagataacgcgcaggtaaagatgatcgagcgtatcaacatccgccaccacgcgattgagcaattcgccctgacgatagcgcgccagtccggcaggggagaggggcagcaatttgctgaaggtgtaaatgcgcagatgctgcaacacgcggaaagtcgcgtcgtgacttaccagacgttcaaaatagcgcccggcagtacgggtgattgctgcgccacgcacgcccgcagcgggtagcatatagttgaagctgtacagtccggcaacccccgcaaccgctgaggccgagaggaaccagccggaaagtgtcaacagaccgatactggcgagcagcgtcacaattgccagcacaataccaagacttaacatccatttatgacgtttatacagtgccagatagggtagcaaagcgcgcatttaaatctcctcctgacgatgggccagtaatgtggcgaatgggccaccagccacacttaattccgcgtaacgtccttgctcaataatccggccatcctgcataacccaaatgacatcccagtcagcaagatcttctaactggtgggtgaccattaacgttgtctggcgcagagaggcggcattcagcgcctccattacgcgctgttcactgtgagcatcaaggctggcagcgggttcatccaacagtaatagcgaacagggatttagtaacgcacgggccaccgccacgcgctgcgcctgccccacggaaaggcgggcagcctggtcgccaacaggcgtatcaacgccttgtgggaggagcggtagaaactcgctgacccaggcgttatccagcgctgcttgtaattcttgttcgctggcatcaggtcgcgccagtagtacgttatcccgcaatgttgctgccggtaattgtgggttttgcccaacccaggagagatgtttacgccatgattctggtgataaatcgcgtaattctatcccgttgattcgtagcgatccctgatatgagagaaaaccagaaagcgcgttcagcagtgagcttttacctgaaccgctgcgaccaaccaacaccgcacgttggcctgctggcaaagtaaagttcagcggtccggccagcgttttaccttccggcgacgtgataaacagctcctcggcctcaatggtcaccggatcggtcgatgctaattccgcctcaccacgttgcggatgggcgagcggggtttccataaacgttttcagactgtcagctgcgccaacagcctgggctttagcatgataaaacgtaccgagatcgcgtaatggctggaaaaactctggcgcaaggatcagggccagaaaacccgcagccagcgtcacaccggtatcgtagtgaccaaaatccagctcgccgagataggaaaaaccaaagtagaccgccaccagagcaattgacagcgaggtaaaaaattcgagaatgccggaggataaaaacgccagccgtagcacttccattgtccgttggcggaaatcttccgaagcagaacgaatactttcaatttcagcttcaccacgaccaaaaatacgcaatgtttccatgccgcgcaggcgatcgaggaaatgcccacttaagcgagcaagagcgagaaagttacgtcggttagcatcggcagcccccattccaaccagcgccataaacaacggaattaacggtgcagtgcccagcagaatgagcgccgcagcccagttagaggggaagattgccaccacaatcagcaacggcaccgacactgccagcgccatttgcggcagatagcgtgcatagtaatcatgcatatcgtcaatttgctcgagtaccagcgtcgcccagctccccgcaggtttaccctgaatccacgctggccctgcttgttgcagacggtcgagaacctgacggcggatggcaaagcggatatgctgcccggcgtgataacccacccgttcgcgtaaccagaccacccatgcgcgcagtacaaaggtcagaaccagtaacgtaaagggaagcagcagggcttcacggggaatattctccataatcatatgttgcagaattcgcgccatgaaccaggcctgggcaatgatcaatatgccgctcacaaagcccagcagacgagaaatattcagccaacgttgggagatgacgctttgctgttttaaccagcgggttaactctttttgacgagatttattcattgcacgcttagcaggtgagttatcagaattatttgcagagcaatgttacaacggggaaaaaataaaggcgacccatagtcgcatggtgtcgccttctttacttttgttactgatttgtaaaattattttgcgtcagctaaaccatcgaggtagcgttccgcatcaagtgctgccatgcagcctgtaccggccgaagtaatggcctggcgataaatgtgatccatcacgtcgcctgcggcaaagacgccaggaatgctggtctgggtggcattaccatgaatacccgactgtactttgatgtagccgttttccagttccagctgcccttcgaaaatcgcagtattcgggctgtgaccgatagcaacaaacagaccggcaacgtcgagtgactcgatgttatcgctgttttgcgtatcgcgcagacgaacgccagtgacacccatttgatcgccggtcacttcttccagcgtacggttggtgtgcagaatgatgttgccgttctccactttatccatcaggcgcttaatgaggattttttccgcgcggaaaccgtcacggcggtgaatcagatgcacttccgaagcgatgttagacagatacagcgcctcttcaaccgcggtattgccgccgccgatgaccgcaactttctggttgcgatagaagaaaccgtcgcaggttgcacaagcagaaaccccacggcctttaaaggcttcttcagagggcaggccgagatagcgtgcagaagctccggtggcaataatcagcgcgtcgcaagtgtattcgccgttatcgccattcagacggaacggacggttttgcagatccaccttgttgatatgatcaaaaatgatctcagtttcaaacttggtggcatgttcgtgcatgcgctccattaataacggaccggtcagatcgtttggatcgccaggccagttttccacttccgtggtggtggtcagttggccgcctttttccatgccggtaatcagcacaggttgcaggttggcgcgcgccgcgtagacagcagcggtgtatcccgccgggcctgaacccaggataagcagtttactgtgtttggtcgtgcccatgagatccccatagttgttggcagacaatgggcaggattgtagggaatttacagacgtaaaaaaagagtatgacgattttgttaacaatttgtgcaatcggcagcatcgataagcaggtcaaattctcccgtcattatcacctctgctacttaaatttcccgctttataagccgattaaatgatgaataaacgcccctgttaatgaatatctggcatgttgtactaaaaatcgatgttttgctttgacaatcccctggtgttttgcgaaaacattcgaggaagaaaaaaaacagtattcttatatgcgcataaccatgcatgtaaataccatgtttaccgtgctagtgaaatctacgtatggcgtggacagacgccattcgtgatgtcgatagctgccacaaggcaacggtcttctcaccgtagacccaggcattgcgcgccgtgaatcttcatgatttcggtctatcgtgacgggtagcgactctgaacagtgatgtttcagggtcagacaggagtagggaaggaatacagagagacaataataatggtagatagcaagaagcgccctggcaaagatctcgaccgtatcgatcgtaacattcttaatgagttgcaaaaggatgggcgtatttctaacgtcgagctttctaaacgtgtgggactttccccaacgccgtgccttgagcgtgtgcgtcggctggaaagacaagggtttattcagggctatacggcgctgcttaacccccattatctggatgcatcacttctggtattcgttgagattactctgaatcgtggcgcaccggatgtgtttgaacaattcaataccgctgtacaaaaacttgaagaaattcaggagtgtcatttagtatccggtgatttcgactacctgttgaaaacacgcgtgccggatatgtcagcctaccgtaagttgctgggggaaaccctgctgcgtctgcctggcgtcaatgacacacggacatacgttgttatggaagaagtcaagcagagtaatcgtctggttattaagacgcgctaacacggaacaggtgcaaaatcggcgtattttgattacactcctgttaatccatacagcaacagtactggggtaacctggtactgttgtccgttttagcatcgggcaggaaaagcctgtaacctggagagcctttcttgagccaggaatacattgaagacaaagaagtcacattgacaaagttaagtagcggccgccgccttctggaggcgttgctgatccttattgtcctgtttgccgtctggttgatggctgccttactaagctttaacccttcggaccccagctggtcgcaaacggcctggcatgaacctatccataatttaggtgggatgcccggtgcgtggttggcagatacgctgttctttatttttggcgtgatggcttacaccattcccgtcattattgtcggcggttgttggtttgcctggcgtcatcagtccagcgacgaatacattgattattttgccgtttcgctacgcatcattggcgttttggcgctcatccttacctcctgtggtctggcggcaatcaacgctgacgatatctggtattttgcctccggtggcgtcattggcagcttactaagcactacgctacaaccactgctacacagtagcgggggaactattgcgctgctctgcgtttgggcagcgggcctgacgttgttcaccggttggtcatgggtgaccattgctgaaaaactcggcggctggattttaaacattctcaccttcgccagtaatcgtacccgtcgcgatgatacctgggtcgatgaagatgagtatgaagacgacgaagagtatgaagatgaaaatcacggcaaacagcatgaatcacgccgtgcccgtattcttcgcggcgcgctagcgcgtcgtaaacggttggcggaaaaattcattaatccgatggggcggcaaacagacgctgcgttgttctccggtaagcggatggatgatgacgaagagattacctacactgcacgcggtgtggctgccgacccggacgacgtcctattttcgggcaatcgtgcaacgcagccagaatatgacgaatacgatccattattaaacggtgcgccaattaccgaacctgtcgctgtagcagctgctgctaccacggcgacacaaagctgggctgcgccggttgaacctgtgactcagacgccgcctgttgcctctgttgatgttccacctgcgcaacctacagtagcctggcagcctgtaccgggtccacaaacgggagagccggttattgctcctgcaccggaaggttacccacagcagtcacaatatgcgcagcctgcagtgcaatataatgagccgctgcaacaaccagtacagccgcagcagccgtattatgcacctgcagctgaacaacctgcgcaacagccgtattatgcccctgcgccagaacaaccggtggcaggtaacgcctggcaagccgaagagcagcaatccacttttgctccacagtctacataccagactgagcaaacttatcagcagccagccgctcaggagccgttgtaccaacagccgcaacccgttgaacagcagcctgttgtggagcctgaacccgttgtagaagagacaaaacccgcgcgtccgccgctttactactttgaagaagttgaagagaagcgagcccgtgaacgtgaacaacttgcggcctggtatcaaccgattccagaaccggttaaagaaccagaaccgatcaaatcttcgctgaaagcaccttctgttgcagcagtacctccagtagaagccgctgccgctgtttccccgctggcatctggcgtgaaaaaagcgacactggcgacgggggctgccgcaaccgttgccgcgccagtcttcagtctggcaaatagcggtggaccgcgtcctcaggtcaaagaggggattggtccgcagttgccacgaccgaaacgtatccgcgtgccaactcgtcgtgaactggcgtcttacggtattaagctgccctcacagcgtgcggcggaagaaaaagcccgtgaagcccagcgcaatcagtacgattctggcgatcagtacaacgatgatgaaatcgatgcgatgcagcaggatgaactggcacgtcagttcgcccagacacagcagcaacgctatggcgaacagtatcaacatgatgtgcccgtaaacgcagaagatgcagatgctgcggcagaggctgaactggctcgtcagtttgcgcaaactcaacaacaacgttattccggcgaacaaccggctggggcgaatccgttctcgctggatgattttgaattttcgccaatgaaagcgttgctggatgatggtccacacgaaccgttgtttacgccaattgttgaacctgtacagcagccgcaacaaccggttgcaccgcagcagcaatatcagcagccgcaacaaccagttccgccgcagccgcagtatcagcagccacaacagccggttgcgccgcagccacaatatcagcagccgcaacaaccggttgcgccacagcagcaatatcagcagccgcaacaaccggttgcgccgcagcagcagtatcagcagccacaacagccagttgcgccacaaccgcaggataccctgcttcatccgctgttgatgcgtaatggcgacagccgtccgttgcataaaccgacgacgccgctgccttctctggatttgctgacaccgccgccgagcgaagtggagccggtagatacctttgcgcttgaacaaatggctcgcctggtggaagcgcgtctggctgatttccgtattaaagccgatgtcgtcaattactctccggggccggttatcactcgctttgaattgaacctggcaccgggcgtaaaagcggcgcgcatttctaacttgtcacgggaccttgcccgttcactttcgacggtggcggtgcgtgtcgttgaagttattcctggcaaaccctatgtaggtctggagttaccgaataaaaaacgacaaaccgtttatctgcgcgaagttttggataacgccaaattccgcgataatccgtcgccattaaccgtggtgctgggtaaagatatcgccggtgagccggtggttgccgatctggcgaaaatgccgcacttgttggttgcggggactaccggttccggtaaatctgtcggtgtgaacgcgatgatcctgagcatgctttataaagcacagccagaagatgtgcgtttcatcatgatcgacccgaaaatgctggagctttcggtttatgaaggcattccgcatctgttaacggaagtcgttactgatatgaaagatgccgccaacgcgctgcgctggtgtgttaacgagatggagcgtcggtataaactgatgtctgcgctgggtgtgcgtaatctggcgggttataacgaaaaaattgctgaagccgatcgcatgatgcgtccgattccagacccgtactggaagccgggtgacagtatggatgcccagcatccggtgctgaaaaaagaaccatacattgtggtgttggttgacgaatttgccgacctgatgatgacggtaggtaaaaaagtggaagagctgatagcacgtctggcgcaaaaagcccgtgccgcgggtatccacctcgtactggcaactcagcgtccatcggttgatgttattactggtctgattaaagcgaatattccgacccgtatcgcctttaccgtatccagtaagattgactcacgtaccattcttgatcaggctggcgcggaatcactgctgggtatgggggatatgctctactctgggccgaactccacgttgccggtacgtgtccatggtgcttttgttcgcgatcaggaagttcatgccgtggtgcaggactggaaagcgcgtggtcgcccacagtatgttgatggcatcacctccgacagcgaaagcgaaggtggtgcgggtggtttcgatggcgctgaagaactggatccgttgttcgatcaggcggtgcagtttgtcactgaaaaacgcaaagcgtcaatttctggcgtacagcgtcagttccgcattggttataaccgtgcagcgcgtattatcgaacagatggaagcgcaggggattgtcagcgaacaggggcacaacggtaatcgtgaagtgctggccccaccgccgtttgactaactaatgcatcgtatgccggataaggcgcggtagcgtcgcatccggcactctatcaactgaaaattcagtattttcttctttcctcaagctgattattagcctggaatagagagtagagggaactcccgatcgggagtgacgtaatttgaggaataatgatgaaaaaaattgccatcacctgtgcattactctcaagcttagtagcaagcagcgtttgggctgatgccgcaagcgatctgaaaagccgcctggataaagtcagcagcttccacgccagcttcacacaaaaagtgactgacggtagcggcgcggcggtgcaggaaggtcagggcgatctgtgggtgaaacgtccaaacttattcaactggcatatgacacaacctgatgaaagcattctggtttctgacggtaaaacactgtggttctataacccgttcgttgagcaagctacggcaacctggctgaaagatgccaccggtaatacgccgtttatgctgattgcccgcaaccagtccagcgactggcagcagtacaatatcaaacagaatggcgatgactttgtcctgacgccgaaagccagcaatggcaatctgaagcagttcaccattaacgtgggacgtgatggcacaatccatcagtttagcgcggtggagcaggacgatcagcgcagcagttatcaactgaaatcccagcaaaatggggctgtggatgcagcgaaatttaccttcaccccgccgcaaggcgtcacggtagatgatcaacgtaagtagaggcacctgagtgagcaatctgtcgctcgatttttcggataatacttttcaacctctggccgcgcgtatgcggccagaaaatttagcacagtatatcggccagcaacatttgctggctgcggggaagccgttgccgcgcgctatcgaagccgggcatttacattctatgatcctctgggggccgccgggtaccggcaaaacaactctcgctgaagtgattgcccgctatgcgaacgctgatgtggaacgtatttctgccgtcacctctggcgtgaaagagattcgcgaggcgatcgagcgcgcccggcaaaaccgcaatgcaggtcgccgcactattctttttgttgacgaagttcaccgtttcaacaaaagccagcaggatgcatttctgccacatattgaagacggcaccatcacttttattggcgcaaccactgaaaacccgtcgtttgagcttaattcggcactgctttcccgtgcccgtgtctatctgttgaaatccctgagtacagaggatattgagcaagtactaactcaggcgatggaagacaaaacccgtggctatggtggtcaggatattgttctgccagatgaaacacgacgcgccattgctgaactggtgaatggcgacgcgcgccgggcgttaaatacgctggaaatgatggcggatatggccgaagtcgatgatagcggtaagcgggtcctgaagcctgaattactgaccgaaatcgccggtgaacgtagcgcccgctttgataacaaaggcgatcgcttttacgatctgatttccgcactgcataagtcggtacgtggtagcgcacccgatgcggcgctgtactggtatgcgcgaattattaccgctggtggcgatccgttatatgtcgcgcgtcgctgtctggcgattgcgtctgaagacgtcggtaatgccgatccacgggcgatgcaggtggcaattgcggcctgggattgctttactcgcgttggcccggcggaaggtgaacgcgccattgctcaggcgattgtttacctggcctgcgcgccaaaaagcaacgctgtctacactgcgtttaaagccgcgctggccgatgctcgcgaacgcccggattatgacgtgccggttcatttgcgtaatgcgccgacgaaattaatgaaggaaatgggctacgggcaggaatatcgttacgctcatgatgaagcaaacgcttatgctgccggtgaggtttacttcccgccggaaatagcacaaacacgctattatttcccgacaaacaggggccttgaaggcaagattggcgaaaagctcgcctggctggctgaacaggatcaaaatagccccataaaacgctaccgttaatgttatcgttgcggtaatgttgttactgtatccctgtggtcgcaggctgtggccacatctcccatttaattcgataagcacaggataagcatgctcgatcccaatctgctgcgtaatgagccagacgcagtcgctgaaaaactggcacgccggggctttaagctggatgtagataagctgggcgctcttgaagagcgtcgtaaagtattgcaggtcaaaacggaaaacctgcaagcggagcgtaactcccgatcgaaatccattggccaggcgaaagcgcgcggggaagatatcgagcctttacgtctggaagtgaacaaactgggcgaagagctggatgcagcaaaagccgagctggatgctttacaggctgaaattcgcgatatcgcgctgaccatccctaacctgcctgcagatgaagtgccggtaggtaaagacgaaaatgacaacgttgaagtcagccgctggggtaccccgcgtgagtttgactttgaagttcgtgaccacgtgacgctgggtgaaatgcactctggcctcgactttgcagctgcagttaagctgactggttcccgctttgtggtaatgaaagggcagattgctcgcatgcaccgcgcactgtcgcagtttatgctggatctgcataccgaacagcatggctacagtgagaactatgttccgtacctggttaaccaggacacgctgtacggtacgggtcaactgccgaaatttgctggcgatctgttccatactcgtccgctggaagaagaagcagacaccagtaactatgcgctgatcccaacggcagaagttccgctgactaacctggtgcgcggtgaaatcatcgatgaagatgatctgccaattaagatgaccgcccacaccccatgcttccgttctgaagccggttcatatggtcgtgacacccgtggtctgatccgtatgcaccagttcgacaaagttgaaatggtgcagatcgtgcgcccagaagactcaatggcggcgctggaagagatgactggtcatgcagaaaaagtcctgcagttgctgggcctgccgtaccgtaaaatcatcctttgcactggcgacatgggctttggcgcttgcaaaacttacgacctggaagtatggatcccggcacagaacacctaccgtgagatctcttcctgctccaacgtttgggatttccaggcacgtcgtatgcaggcacgttgccgcagcaagtcggacaagaaaacccgtctggttcataccctgaacggttctggtctggctgttggtcgtacgctggttgcagtaatggaaaactatcagcaggctgatggtcgtattgaagtaccagaagttctgcgtccgtatatgaacggactggaatatattggctaatacccaatttttctgaatctaaaaagcgcctgcgggcgctttttttgtctccctttgataccgaacaataattactcctcacttacacgtaatactactttcgagtgaaaatctacctatctctttgattttcaaattattcgatgtatacaagcctatatagcgaactgctatagaaataattacacaatacggtttgttactggaatcaatcgtgagcaagcttgagtgagccattatgaaaacgaaaatccctgatgcggtattggctgctgaggtgagtcgccgtggtttggtaaaaacgacagcgatcggcggcctggcaatggccagcagcgcattaacattaccttttagtcggattgcgcacgctgtcgatagcgccattccaacaaaatcagacgaaaaggttatctggagcgcctgtacagttaactgtggtagtcgctgcccgctacgtatgcacgtcgtggacggtgaaatcaaatatgtcgaaacggacaataccggcgatgacaattacgacggcctgcaccaggttcgcgcctgcctgcgtgggcgttccatgcgtcgccgtgtctacaatccggaccgcctgaaatatccgatgaaacgagtcggggcgcgcggtgaaggcaaattcgagcgcattagctgggaagaagcctacgacatcatcgcgaccaatatgcagcgcctgatcaaagagtacggcaacgagtctatctatctgaactatggcaccggtacgctgggcggcaccatgacccgctcctggccgccgggaaataccctggtcgcgcggctgatgaactgctgcggcggctatctgaaccattacggcgactactcctccgcgcaaattgcggaaggtttgaactatacctacggcggctgggcagatggcaacagcccgtcggatatcgaaaacagtaagctggtagtgctgtttggtaataaccctggcgaaacgcgaatgagtggcggtggggtgacttactatcttgaacaggcacgccagaaatctaatgcccgcatgatcatcatcgatccgcgctataccgacaccggtgccgggcgcgaagatgagtggatccctattcgtccgggaacagatgccgcactggttaacggtctggcgtacgtcatgatcactgaaaacctggtggatcaggcattcctcgataaatattgcgttggctacgatgagaaaaccctgccagccagtgcgccgaaaaatggccactataaagcttatattctgggtgaagggccagatggcgtggctaaaacgccggaatgggcctcgcaaatcactggtgttccggcagacaaaatcatcaaattggctcgtgaaatcggtagtaccaaaccggcgtttatcagccagggatggggcccgcagcgtcacgctaacggtgaaatcgcaacccgtgctatctcgatgctggcgattctgaccggtaacgttggtattaacggaggcaacagcggcgcgcgtgaaggttcatacagcttaccgtttgtccgtatgccgaccttggaaaacccgatccagaccagcatttcgatgtttatgtggaccgatgccattgaacgtggcccggaaatgacggcgctgcgtgatggtgtacgcgggaaagataagctggatgtgccgatcaaaatgatctggaactatgccggtaactgcctgattaaccagcattctgaaatcaaccgtacccatgaaatccttcaggatgataagaagtgcgagctgattgtggttatcgactgccacatgacctcatcggcgaaatatgctgacatcctgctgcctgactgcaccgcttccgaacagatggactttgcgctggatgcatcctgcgggaatatgtcttacgtgattttcaacgatcaggtgattaaaccgcgctttgaatgtaagaccatctatgaaatgaccagcgaactggcaaaacgtcttggcgttgagcaacagtttactgaaggccgtacccaggaagagtggatgcggcatctgtatgcccagtcgcgggaagcgattcctgaactgccaacgtttgaagagttccgcaagcaggggatctttaaaaagcgcgacccacaagggcatcacgttgcttataaagccttccgtgaagatccgcaggcaaacccactgactacgccatcgggcaaaattgagatttattcgcaggcgctggctgacattgccgctacctgggaattgcctgaaggcgatgtgatcgatccactgccgatctacacgccgggctttgaaagttatcaggatccgctgaacaaacagtatccgctgcagcttacaggtttccactataaatctcgcgttcactcaacttacggcaacgttgatgtgctgaaagcggcttgccgtcaggaaatgtggatcaacccgcttgatgcccaaaaacgcggtatccacaacggcgataaagtcaggatctttaacgatcgtggtgaggttcatattgaggcgaaagtgacgccacgaatgatgccgggtgtggtcgcactgggtgaaggtgcctggtatgacccggatgcaaaacgtgtcgataagggtggttgtattaacgtactgaccactcaacgtccgtctcctctcgctaaggggaatccgtcacatacaaaccttgttcaggttgaaaaggtgtaaggagtaaccgatgacaacccagtatggattttttattgattccagccgttgcaccggttgcaaaacctgcgagctggcctgtaaagactacaaagatttgacgccagaagtcagcttccgccgcatttatgaatatgctggcggcgactggcaggaagataacggtgtctggcaccagaacgtgtttgcctactatctgtcgatttcatgtaaccactgcgaagatccggcttgtactaaagtctgcccgagcggtgcgatgcataaacgtgaagatggttttgttgtggtcgatgaagatgtgtgcattggctgccgctactgccatatggcttgcccgtatggcgcaccgcaatataacgaaacgaaaggccatatgaccaaatgcgatggttgttatgaccgtgttgcggagggtaaaaagccgatctgtgttgaatcttgtccgctgcgggcgctggatttcggccctatcgacgagctgcgtaaaaaacatggcgatctggcggccgttgcgccgttgccgcgagctcactttaccaaaccgaatattgtgatcaaacccaatgccaatagccgcccgaccggggataccactggctatctggcaaacccgaaggaggtgtgagatgggaagtggatggcatgaatggccgctgatgatcttcacggtcttcgggcaatgtgtagcaggtggttttatcgttctggctttggcgctgctcaaaggcgacctgcgagcagaagcccagcagcgtgttatcgcctgcatgtttggtttatgggtgctgatgggcattggctttatcgcctctatgctccatcttggttcaccaatgcgcgcttttaactcgctcaaccgggtaggggcttcagcactcagtaacgaaatcgccagcggttcgatcttttttgccgtaggcggcatcggctggttgctggcaatgctgaaaaagctgtcaccggcattgcgtacgctgtggctgatagtgacgatggttcttggcgtcatctttgtctggatgatggtgcgtgtgtataacagcattgataccgttccgacctggtacagcatctggacgccgatgggcttcttcctgacgatgtttatgggcggcccgttactgggttacctgttgttgagtctggctggcgtcgatggctgggcgatgcgtctgctgccagcaatttctgtactggcactggtagtgagtggcgtggtgtcagtgatgcagggcgcagagctggcgactattcatagttctgtgcagcaggccgcagcgctggtgccggactatggtgcgctgatgtcctggcggatcgtgcttttggccgttgccctgtgcttgtggattgcaccacagctaaaaggttatcagcctgcggttccgctactttctgtatcattcattctgcttctggcaggggaattaatcggtcgcggcgtattctatggtttgcatatgaccgtggggatggccgtcgcaagctaatcataacaaccggggtttcggccccggttctcttttatttctgcttcgttaacgtgtcataactggtcatcaaattacgataatcaggaatgtggttagagaacaacgtcgccagtccttcaatatcattacgccagtcgcgatgcagctcgcacgccacgccgaaccatgtcatcaattgcgcaccagcttgcgacaagcgatcccatgccgaatgccgggtaatttcattaaaggtccctgacgcgtcagtcacgacaaagacgtcaaacccttcttcaatggctgaaagcgccgggaatgccacgcaaacttcggttaccacaccggcaataattaactgttttttacctgtcgctttgacagcttttacaaaatcttcgttatcccaggcgttaatatttcccgggcgagcaatgtaaggtgtatcggggaattgtgctttcagttctggaactaatgggccgttaggaccggtttcaaaactggtggtaagaatagttggtaagttgaaatacttagccaggtcacccagcgccagcacgttatttttaaacttatcgggttcgatatcccgtacaagggaaagtaaaccagcctggtgatcaacaagcaaaacggcagcatcatttttatcaagacgaacatacggtttggtcatcctcttctcctttcgagagtcagtggtacgtctgaaatcgatcagacgcgatgcattgctctgaaagcatagacgggaaatatgagtttgctgtgaccatgaaatttttcgactgaacgaagcgtatgaaatttgtgttagttcaataaaaacaatcagatgagactaatcatctcttcagcattagcgttatgaatgagtaatataaatcgataataccgccgctgggatatcgcgtattttcacccattgacaatgtttttggcggtggcatgatgcgcatgaaatttgaacttcctcacggttttaattcatgtccacgtatacccagcctgtcatgcttttgctgtctggcctgcttttgttgactctggcgattgcggtgttaaatacactcgtgccgctttggctcgcccaggaacacatgtccacatggcaggtaggcgttgtcagctcatcctattttaccggcaaccttgtcggtacattgctgacagggtatgtcattaagcgcattggctttaaccgcagctattatctggcctccttcatttttgccgctggctgtgccggccttggcctgatgattggattctggagctggttggcttggcgttttgtcgcgggcgtcggctgtgccatgatttgggtggttgttgagagcgcgctgatgtgcagtgggacgtcacgtaaccgtgggcgtttgcttgctgcgtatatgatggtttattacgtgggaacgtttttaggccagttactggtcagcaaagtttcaaccgagctgatgtccgtattgccgtgggttacaggtttgacgttggcagggatcttaccgctgttgtttacgcgtgtgctgaatcagcaggctgaaaaccatgattcgacgtcaattacgtcaatgctaaaactccgtcaggcgcggcttggcgtgaatggctgcattatctcaggaatcgttctgggatctctatatggcctgatgccgctgtacctcaatcacaaaggggtgagcaatgccagcattggtttctggatggcggtactggtcagtgcgggtatccttggacaatggccgattggacgtctggcggataagtttggtcgactgctggtgttgcgtgttcaggtctttgtcgtcattctcggcagtatcgcgatgcttagccaggcggcgatggccccagcgttattcatcctcggtgccgctggctttacgctatatccggtggcgatggcatgggcttgcgagaaagttgaacatcatcaactggtggcgatgaaccaggccttactgttgagctatactgtgggaagtctgcttggcccgtcatttaccgctatgctaatgcagaatttctccgataatttattgtttatcatgatcgccagcgtatcgtttatctatttgctgatgctgctgcgcaacgccggtcatacgccgaaacccgttgctcacgtgtaaatgaattcaagcagagtgtgaacttactgtttcacactctgcttttttgtttcttctatctgacttgctttattccaaattttattcgtttaaaaataaaatgtgcagcaggttataattttgcatttcgctatttccgcacttcttatttgccgcgcataatccctcgttttaccgatgcccctttaattttggcgaaggatttgtctatggctgggaatgttcaggaaaaacagttgcgatggtacaacattgcgctgatgtcttttatcactgtctggggttttggcaacgttgttaataactatgccaaccaggggctggtggttgttttttcatgggtgtttatctttgcactctatttcacaccttatgcgctaattgttggtcagttaggctcgaccttcaaagatgggaagggcggggtcagtacctggattaaacacacgatgggacccggactggcttatctcgccgcgtggacctactgggtggtgcatattccctatctggcacaaaaaccccaggcaattctgattgcgctcggttgggcgatgaaaggcgacggttcgctaatcaaagaatattcagtcgtagcgttacaggggttaacgctggtgctgtttatcttctttatgtgggttgcttcacgcggtatgaaatcgctgaaaatcgtcggttctgtggcagggattgctatgtttgttatgtcactcctgtatgtggcgatggcggtaaccgcgcctgcaattactgaagtgcatattgcgaccacaaacattacctgggaaacgttcattcctcatatcgactttacctacattaccactatttcaatgctggttttcgcggttggcggagcagagaagatttctccttacgttaatcaaacgcgcaacccaggaaaagaatttccaaaagggatgttatgcctggcggtgatggttgcggtttgtgccattctgggctcgctggcgatggggatgatgtttgattcgcgtaatatcccggatgacttaatgaccaacggtcagtattacgcctttcagaagctgggcgagtattacaacatgggtaatactttaatggtgatttacgccattgcgaataccctgggacaagtagcggcgctggtattctcgattgatgccccgcttaaagtgctattaggtgatgctgacagcaaatatattccagccagtttatgtcgtaccaacgcttctggtacgcccgttaatggctattttctgaccctggtactggtggcgattctgattatgctgccgactctcggcattggtgatatgaacaatctctataaatggctgttgaaccttaattcggtagtgatgccgctgcgttatttatgggtatttgttgcatttattgcagtcgttcgcttggcgcagaaatataaaccagaatatgtctttattcgtaataagcctctggcaatgaccgtcgggatttggtgttttgcctttaccgcctttgcctgtttgacggggatcttcccgaaaatggaagccttcactgcagagtggaccttccagttggcgctgaatgttgcaacgccgtttgtgctggtaggattaggactgatattcccgctgctggcgcgtaaagcgaatagtaaataattattgtggtcggtgacgctgactctggcagatctgacccgtttttacataatcgagaaatgcgcgcaagccgcaggacatatactggcggtttggataatagatctggaagcctggacgctctgtgctccagtcttccagtacacattctaaacgaccagtatcaaggtactccttgatctgttcatagagcagatacccgataccagcacccatcaaaacggcctccagttcagcatcaacatcatccagaatgatatttcctgcgacagcaatttccagctcctttgcaaattgccagtggaaaggtttgccgctgggataacgaaaaacaacacattgatgattaagcagatcatgaggatggcggggtttgccatatcttgcaaagtactctggcgttgctgctacacataatttcactggcgggccgatcgccacgctgatcatatctttttcgacgatgcaactaagtcgaacgccagcgtcaaagccctgttggacgatatcgacaagagagtcgtcagttgtgagctcgactttaatatcaggatattcacgtgtgaaaccaaccagtaaagacattaaaaatatacgtgcagctacccgggcggcattgattttgagcgttcctgtcggtgtcagacgaaaatcattcatctcatctaacatgatctgaatttcgtcgaaagctgggcgcaatcgttcatagagattagaacccgcttccgttaacgatacgcttcgggttgtccgattgaataagcgaattttaagacgttgttccagtgttttaatactatggctaatggcggacgaggataagcctaactcatcgcccgctgcacgaaagctttgattacgggccacggcaaagaaagtggcaaagtcagacatattcatccgcattagtgaaaatccttcattaactcatcctgaatcatcacgtttacaggattatgccgcctgcgtaaagtgcgctccagaacttaacgtggaggtaaaattatgcagtctgaacgtatttatttggtatgggcccatcctcgtcatgattcattgaccgcacatattgctgatgcgatccatcagcgggcaatggagcggaaaatacaggtgacggaactcgatttatatcggcgtaatttcaacccagtgatgacgccggaagatgaaccagactggaagaatatggataaacgttattctccagaggttcatcagctttattcagagctgcttgaacatgacacgttagtggtggtttttcctctctggtggtacagcttcccggcaatgctaaaaggatatattgacagagtatggaataatgggctggcttatggagatgggcacaaattaccattcaataaagttcgttgggtggcgctggttggaggagacaaagaatcatttgtccagatgggctgggaaaaaaatataagcgattatttaaaaaatatgtgcagttatcttggtattgaagatgccgatgtcactttcttgtgtaatacagtggtattcgatggggaagaacttcacgcgagctattatcagtcgttattatctcaggtacgggatatggtagatgcactataagatgtgttaaaaacgctgtagcagaatgaagcgcggaataaaaaagcggcaactcaataaagttgccgctttacggggaaattagaacattaccttatgaccgtactgctcaagaatgcctttcacgcgttccatggtctctttcttcggtggtttaacaccgtcgagtttgtactcttcacccattgccacccatttgtgtttgcccagctcgtggtaggggagaagctcgattttctcaacgttgcccatatcacgggtaaattcaccgaggcgatgcgctgaatcgtcatcgtcagaccagcctgggacaacaacgtagcggatccacaccttcacatttttgttcgccagatatttagcgaactccagcgtgcggtggttggaaactccaaccagattttggtggatctcgtcgttcatctgtttgagatcgagcattaccaggtcggttacttccagcagttcatcaatcaccggatcgtaacgacgaacaaaaccgttggtgtccagacaggtatgaatgccttcttttttgcaggcgcggaaccagtcacgaacaaactcagcttgcaggattgcttcaccgccggatgcggtaacgccgccgccggaagcgttcataaagtggcgataggtcaccacttccttcatcaaatcttcaacggtaacttctttaccgccatgcgtgtcccaggtgtcgcggttatgacaatacaggcagcgcatcaggcagccctggaaaaaggtgataaagcgaatacctgggccgtctacggttccacaggattcaaaggagtgaatgcgaccaataactgacattgcggtgtttctccagatgtggcccatctgaggccgtgttggtgcgcagctcgaaggctacgtcgagtctgttttggcagtcaccttaaagtatagatagctgacaaaaaaggctctcgcgctaaaaaaggccccactttcgtggagcctttattgtacgctttttactgtacgatttcagtcaaatctaattacatagattgagtgaaggtacgagtaataacgtcctgctgctgttctttagtcagcgagttgaaacgtactgcgtagccagatacacggatggtcagctgcggatatttttccgggttttccatcgcgtcgagcagcatttcacggttcatcacgttaacgttcaggtgctgaccaccttcgatggatgcttcgtggtggaagtaaccatccatcagaccagccaggttggtcttacgaacttcgtcgtctttacccagtgcgttcggaacgatagagaaggtgtaggagataccatctttagcgtaagcaaacggcagtttagcaacggaagtcagagaggctactgcacctttctggtcacgaccgtgcatcgggttagcacccggtccgaacggcgcgccagcacgacgaccgtctggggtgttacccgttttcttaccatacacaacgttagaagtgatggtcagaacagactgagtcgggatagcgtcacggtaggtgtgcagtttctgaattttcttcatgaaacgttctaccaggtcaacagccaggtcatctacacgcggatcattgttaccaaactgcgggtattcgccttcgatttcgaagtcgatagccagaccgtcttcgtcacgaatcggtttaactttcgcatatttgattgcagacagggagtcagcagcaacggacagaccagcgataccacacgccatggtgcggataacgtcacggtcgtgcagcgccatcagagaggcttcgtagctgtacttgtcgtgcatgtagtggatgatgttcagtgcagtgatgtactgtttagccagccagtccatgaagtgatccatgcgctccatcacttcatcatagttcaggacatcgcctttgatcggttcagacttcggaccaacctgcattttcagtttttcgtcaacgccgccgttgattgcgtacagcatggttttcgccaggtttgcacgcgcaccgaagaactgcatttgtttaccaacgatcatcgggcttacgcagcaagcaatagcgtagtcatcgttgttgaagtccggacgcatcaggtcatcgttctcatactgcagagaagaggtgtcgatggacactttagcggcgaatttcttgaagttcagcggcagtttttcagaccacagaatggtcatgttcggttccggagacggacccatggtgtacagggtgttcaggaaacggaagctgtttttggtaaccagggtacgaccgtcgaggcccataccaccgatagattcggttgcccagatcgggtcgccagagaacagttcatcgtattccggagtacgcaggaagcgaaccatacgcagtttcatgaccaggtggtcaaccatttcctgcgcttcttgttcggtgatcttgccagctttcaggtcacgttcgatgtacacatccaggaaggtggaggtacgaccgaaggacattgcagcaccgttctgagacttaacagcagccaggtagccgaagtaagtccactggatagcttcctgagcgttggtagccggaccagagatgtcgtagccgtatttcgcagccatttctttcatctgacccagagcgcggtgctgttcagcgatttcttcgcgcagacggatagtctgttccaggtttacgccgttttccagatcagcctgcagagaagtgaactgtgccagtttgtctttcatcaggtagtcgataccgtacagcgcaacgcgacggtagtcaccgatgatacggccacggccatatgcatctggcagaccggtcagaacaccagatttacggcaacgcaggatgtccggagtgtaaacgtcgaacacgccctggttgtgagttttacggtattcagtgaagatttttttgatcatcggatccagttcgcggttgtacgctttgcaggaaccttcgatcattttgataccaccgaacgggataagagcacgtttcagcggagcttcagtctgcagaccaacgattttctcaagctgcttgttgatgtagccagcgtcgtgagaggtgatggtggaagcaacagcggtgtcaaagtcaactggcgcgtgagtgcggttttccagtttaacgccttccattactttgtcccacagggtggtggtcgcttcagtagcgccagccaggaaggactcgtcaccctcgtacggagtgtagtttttctgaatgaagtcacggacgtttacttcattctgccagtcacctttggtaaaaccttcccaggctgtggctaacttttcattaagctcggacatgtaacacctaccttcttaagtggattttttatttactgcgtacttcgacaaccattaatggtggtcgttttcacgcaggtaaatgacccagtatgtcaacccaaccaacaaaccaccaccgataatgttgccgatcgtaaccggaatcaggttatcagtgatgaaattcatcacggtcaggtgagaaaaattttccggtgcagaaccgactgcggtccaaaattccggggatgcgaagtcgcggattacaatacccatcgggatcataaacatgtttgcgatactgtgctcaaaaccgctggcaacaaacatcgcgaccggcagcaccataatgaacgctttgtccatcaggctgcggccagaataactcatccatactgccagacataccatcaggtttgccaggataccaagacagacggcctcaataaaagtatggtgcactttgtggtcggcggtttgtaggacgtttagtccccattgaccatttgcggtcatatactcgccggaaagccacattaaaagtacaaacagcagtgcgccgaccaggttgccaaaatagacatttagccagtttttcgccaactgaccccaggtgatgcgcccactcgccttagcaacaacaatcaacacggtggaagtaaagagatcggctccgcagacaacacaaagaatcagccccagagagaagcaaatgccgccaaccagttttgccatgccgaagggcattgtgcctgtgccagtggttgctgtgatatagaagacgaatgcgattgagatgaaaacaccggcggtaatcgccagatagaaagtcttaagcggatgtttcgttgctttatagacacccgcctcttcggccactttggccattgcagcaggaagtaaaagatcaaaagggttgtcagctttcacactaactctctctttattaagtcggcgacgagatactaacaaagcattatagatgagaaattgatatagatcatatctcgcctggcttataggcccgtaactcgcatggtttttatgcaaatacggagtaaatatttgattatccaaataaaaataaattttaaaaattaacaaatgagttgaattttttccgcatcctccgctaaaacagttaattaaaagggagcatcaggcgaataaagtaacaatatcgatcgtatttattaaatacaaattaccgatatttaaccttataattacaattattttattaatgcaaatatatgtaaagcggggcattaaaaaaacgccccgtaatataactcagactaatcattaagcctacattgcgtaggctatttgattttattttgcccagaatgctgctttggcgcgctgcagcttttcgtaggccttcaacaacgactgatgtgcagcaaacgcgtgcagatcgctatctaccggttgcaggccgtaaaacgccgcttcgccgctcattgccgcactggcggcttctacggcatctgcgccgtacatgcgaacaaacgcattcagatattgcagcggctggcgatcttcttcctgtgccagtaataacaacgtttgcaggcagcgataatagttggcgcgttccggactaaatactgatgagttaaactccatcgtccattcggtccagaccagagcctgttccagatcgccaccagccagcgccagcatggcttttaattcaccgatacgcagggtgtaccaaccgttatccgacccggtcgccagacccaacagctcacgcacgcgggtaaagtcatcaaaaccttcttcatccagttgctcgatgaggttcaggtaatcttctttttcccactcgctgcctggtagcgaaagaatcgtttcacgtaaatggctgcccatactgttattcgcgagccacagatcttcagccggataaatatcggacatgccaggcacgataatacggcaagcataaacgcccagatgctcgtaatcggcaatataaacttctttatcttctttgttgaagatagccatcagtgtggcgaactcttcttccgtggtgccggagaaattccagtccacaaacggataatcggcatcctgcttgaacaggtcccaggagattaaaccgctggaatcgataaagtgcgtttcgaggttggtatgttcagcgacttcttcatcatcgaaggttggcggagtaaacacatccaaatctttcaggccacgaccttgcagcagctcggtcacggtacgttccagtgctacgccaaaatcaggatgcgcaccgaaagaggcaaagcaggtaccgttagcaggattgaacagtaccacgcaaatcaccggatactggccgccaagcgaaccgtcataagcgaagattgggaaaccctccgcttccagcgtttcgatggcttcaactactgctgggtaacgcgccagcacgtctgccgggatctctggcaggctgatgctttcagcaataatgcggtttttcacgtagcgttcgaaaacttcagacaatccctgaacgcgtgcttcgttgcgggtattacctgcggacataccgttggagacgtacaggttaccaatgatattcatcggaatataaacggtctgattgtcggactgacgcgtaaacggcaggccgcaaataccacgatcttcgttaccggattgtaggtcaatcagcatgctgccggtcagttcattctccggatcataaaacgcgcgcagacggtcatcgagcagcccttctggcacatcgtcattttcggtcagtgggaaccatttttcgttgggataatgcacgaacggaccgttggcgatggtttcgcccagccagaagtccgcaaaaaagtagttggttgagagacgctcgaaatattcaccgagtgcagaagccagcgccgctttcttggttgcgcctttaccgttggtaaaacacagtgcgcactctttgtcgcgaatatgtacagaccagacgttaggcacgggattcagccaggaggcctcttcaatctgaaagccgaggtctgaaagtttttgctggaagcgagcgatggaatcttccagagcggcatctttgccggggataaatgtttgcgtcatgaaaatcactttagtcgtacggaaagcgcgcaataatacgggttttatctcaaaggcgctatcaccgccgccatgccgatgaactgttgactatgcttttagcggataaaccacgttaagagcataaaaatgaaggcgttcgatctccaccgtatggcatttgataaagtgccttttgatttccttggcgaagttgcactacgtagtctttatacctttgtactggtctttttgttcctcaaaatgaccggaagacgcggtgtgcggcagatgtcgctgtttgaagttttaatcattctgacgctgggatcagcggcgggagatgtggcgttttatgatgatgtgccgatggtcccggtacttatcgtctttattactctggcgttgttataccgcctggtaatgtggttgatggcgcacagtgaaaaactggaagatcttctggaaggcaagccagttgtcattattgaagatggcgagctggcctggtcgaaactcaataactccaacatgacggaatttgagttctttatggagctacgattgcgtggcgtggagcagctggggcaggtacgtctggcgattctcgaaaccaacgggcaaatcagtgtctatttctttgaagatgacaaggtgaaaccgggtttacttattttacccagtgattgtacgcagcgttacaaagtggtgccggagtcggcggactatgcctgtattcgttgtagtgaaatcattcatatgaaagcgggggaaaaacaattatgtccgcgctgtgcaaatccagaatggacgaaggcaagtcgggcaaaacgggtgacctgacagtaaaaacatcggctttttgctaataatccgagagattcttttgtgtgatgcaagccacatttttgccctcaacggttttactcattgcgatgtgtgtcactgaatgataaaaccgatagccacaggaataatgtattacctgtggtcgcaatcgattgaccgcgggttaatagcaacgcaacgtggtgaggggaaatggctcaaatcttcaattttagttctggtccggcaatgctaccggcagaggtgcttaaacaggctcaacaggaactgcgcgactggaacggtcttggtacgtcggtgatggaagtgagtcaccgtggcaaagagttcattcaggttgcagaggaagccgagaaggattttcgcgatcttcttaatgtcccctccaactacaaggtattattctgccatggcggtggtcgcggtcagtttgctgcggtaccgctgaatattctcggtgataaaaccaccgcagattatgttgatgccggttactgggcggcaagtgccattaaagaagcgaaaaaatactgcacgcctaatgtctttgacgccaaagtgactgttgatggtctgcgcgcggttaagccaatgcgtgaatggcaactctctgataatgctgcttatatgcattattgcccgaatgaaaccatcgatggtatcgccatcgacgaaacgccagacttcggcgcagatgtggtggtcgccgctgacttctcttcaaccattctttcccgtccgattgacgtcagccgttatggtgtaatttacgctggcgcgcagaaaaatatcggcccggctggcctgacaatcgtcatcgttcgtgaagatttgctgggcaaagcgaatatcgcgtgtccgtcgattctggattattccatcctcaacgataacggctccatgtttaacacgccgccgacatttgcctggtatctatctggtctggtctttaaatggctgaaagcgaacggcggtgtagctgaaatggataaaatcaatcagcaaaaagcagaactgctatatggggtgattgataacagcgatttctaccgcaatgacgtggcgaaagctaaccgttcgcggatgaacgtgccgttccagttggcggacagtgcgcttgacaaattgttccttgaagagtcttttgctgctggccttcatgcactgaaaggtcaccgtgtggtcggcggaatgcgcgcttctatttataacgccatgccgctggaaggcgttaaagcgctgacagacttcatggttgagttcgaacgccgtcacggttaatgccgaaattttgcttaatccccacagccagcctgtggggtttttatttctgttgtagagagttgagttcatggaatccctgacgttacaacccatcgctcgtgtcgatggcactattaatctgcccggttccaagagcgtttctaaccgcgctttattgctggcggcattagcacacggcaaaacagtattaaccaatctgctggatagcgatgacgtgcgccatatgctgaatgcattaacagcgttaggggtaagctatacgctttcagccgatcgtacgcgttgcgaaattatcggtaacggcggtccattacacgcagaaggtgccctggagttgttcctcggtaacgccggaacggcaatgcgtccgctggcggcagctctttgtctgggtagcaatgatattgtgctgaccggtgagccgcgtatgaaagaacgcccgattggtcatctggtggatgcgctgcgcctgggcggggcgaagatcacttacctggaacaagaaaattatccgccgttgcgtttacagggcggctttactggcggcaacgttgacgttgatggctccgtttccagccaattcctcaccgcactgttaatgactgcgcctcttgcgccggaagatacggtgattcgtattaaaggcgatctggtttctaaaccttatatcgacatcacactcaatctgatgaagacgtttggtgttgaaattgaaaatcagcactatcaacaatttgtcgtaaaaggcgggcagtcttatcagtctccgggtacttatttggtcgaaggcgatgcatcttcggcttcttactttctggcagcagcagcaatcaaaggcggcactgtaaaagtgaccggtattggacgtaacagtatgcagggtgatattcgctttgctgatgtgctggaaaaaatgggcgcgaccatttgctggggcgatgattatatttcctgcacgcgtggtgaactgaacgctattgatatggatatgaaccatattcctgatgcggcgatgaccattgccacggcggcgttatttgcaaaaggcaccaccacgctgcgcaatatctataactggcgtgttaaagagaccgatcgcctgtttgcgatggcaacagaactgcgtaaagtcggcgcggaagtggaagaggggcacgattacattcgtatcactcctccggaaaaactgaactttgccgagatcgcgacatacaatgatcaccggatggcgatgtgtttctcgctggtggcgttgtcagatacaccagtgacgattcttgatcccaaatgcacggccaaaacatttccggattatttcgagcagctggcgcggattagccaggcagcctgaatgaacaacgggcaataaatagccaaatctttctttatcaaaacgtcggcacattgtcggcgttttttttcggaccttgtgagtcattttgattaatggtagcgtcgcttgtcaatgtaagttgttgatacataatatttatatatgattaatcaacggatgattcacatgaagaatactaaattactgctggcgattgcgacctctgcagcattactgacagggtgtcaaaatacccacggtattgataccaatatggctatcagctccggtttaaatgcctataaagcagcaacattaagcgatgccgatgcaaaagcgattgccaatcagggctgtgccgaaatggacagcggcaatcaagtcgcaagtaaatccagcaagtacggtaaacgtctggcaaaaatcgccaaagcattgggtaacaatattaatggcacgccggtcaactataaggtttatatgaccagcgacgtcaacgcatgggcgatggcgaacggctgtgttcgtgtctacagtggcctgatggacatgatgaatgacaacgaaattgaaggcgttctgggccatgaactgggccacgtcgcgttgggtcactcgctggctgaaatgaaagcttcttatgcgatcgttgccgcacgcgatgccatttcagctaccagcggtgtggcttcccagctttcccgctcacaattaggtgatatcgcagaaggcgctatcaatgctaaatactcccgtgataaagagtccgaagcagatgatttctcctttgatctgttgaagaaacgtggcatcagcacccaggggctggttggcagctttgaaacactggctagcctggatggcggtcgcacccagtccatgtttgactctcacccaccatcaacagagcgtgcgcaacacatccgtgatcgtatcgcctctggtaagtaaatcattgtcatctttcgggctggtcttctgccagcccgctataattgcgcaataaatccccatctgaatacagacaaaactggtttttgcacacaacgttaacgatttgtggcgtcggcgcgtataatgcgcgcggttatgttaacggtacgcctgttttaaggagataaagatgacggcaattgccccggttattaccattgatggcccaagcggtgcagggaaaggcaccttgtgtaaggctatggcggaagcgttgcaatggcatctgctggactcgggtgcaatttatcgcgtactggcattggcggcattacatcaccatgttgatgttgcgtcggaagatgcgctggtaccgctggcatcccatctggatgtacgttttgtgtcgaccaatggcaatctggaagtgatcctcgaaggggaagatgtcagcggcgaaattcgtactcaggaagtggcgaatgcagcttcacaagtcgcggcattcccacgcgttcgtgaagcattattgcgtcgccaacgcgcgtttcgcgaattaccaggtctgattgccgatggccgcgacatgggaacggtggtattccctgatgcaccagtgaaaattttccttgacgcctcctcggaagaacgtgcgcatcgccgcatgctacagttgcaggagaagggctttagtgttaactttgagcgccttttggccgagatcaaagaacgcgacgaccgcgatcgtaaccgagcggtagcgccactggttccggcagccgatgctttagtgttggattccaccaccttaagcattgagcaagtgattgaaaaagcgctacaatacgcgcgccagaaattggctctcgcataagcgaccgaatttgcagtacccccgttgcaatggaatgacagcgggtatgttaaacaaccccatccggcatggagccaggtggacgttaaatataaacctgaagattaaacatgactgaatcttttgctcaactctttgaagagtccttaaaagaaatcgaaacccgcccgggttctatcgttcgtggcgttgttgttgctatcgacaaagacgtagtactggttgacgctggtctgaaatctgagtccgccatcccggctgagcagttcaaaaacgcccagggcgagctggaaatccaggtaggtgacgaagttgacgttgctctggacgcagtagaagacggcttcggtgaaactctgctgtcccgtgagaaagctaaacgtcacgaagcctggatcacgctggaaaaagcttacgaagatgctgaaactgttaccggtgttatcaacggcaaagttaagggcggcttcactgttgagctgaacggtattcgtgcgttcctgccaggttctctggtagacgttcgtccggtgcgtgacactctgcacctggaaggcaaagagcttgaatttaaagtaatcaagctggatcagaagcgcaacaacgttgttgtttctcgtcgtgccgttatcgaatccgaaaacagcgcagagcgcgatcagctgctggaaaacctgcaggaaggcatggaagttaaaggtatcgttaagaacctcactgactacggtgcattcgttgatctgggcggcgttgacggcctgctgcacatcactgacatggcctggaaacgcgttaagcatccgagcgaaatcgtcaacgtgggcgacgaaatcactgttaaagtgctgaagttcgaccgcgaacgtacccgtgtatccctgggcctgaaacagctgggcgaagatccgtgggtagctatcgctaaacgttatccggaaggtaccaaactgactggtcgcgtgaccaacctgaccgactacggctgcttcgttgaaatcgaagaaggcgttgaaggcctggtacacgtttccgaaatggactggaccaacaaaaacatccacccgtccaaagttgttaacgttggcgatgtagtggaagttatggttctggatatcgacgaagaacgtcgtcgtatctccctgggtctgaaacagtgcaaagctaacccgtggcagcagttcgcggaaacccacaacaagggcgaccgtgttgaaggtaaaatcaagtctatcactgacttcggtatcttcatcggcttggacggcggcatcgacggcctggttcacctgtctgacatctcctggaacgttgcaggcgaagaagcagttcgtgaatacaaaaaaggcgacgaaatcgctgcagttgttctgcaggttgacgcagaacgtgaacgtatctccctgggcgttaaacagctcgcagaagatccgttcaacaactgggttgctctgaacaagaaaggcgctatcgtaaccggtaaagtaactgcagttgacgctaaaggcgcaaccgtagaactggctgacggcgttgaaggttacctgcgtgcttctgaagcatcccgtgaccgcgttgaagacgctaccctggttctgagcgttggcgacgaagttgaagctaaattcaccggcgttgatcgtaaaaaccgcgcaatcagcctgtctgttcgtgcgaaagacgaagctgacgagaaagatgcaatcgcaactgttaacaaacaggaagatgcaaacttctccaacaacgcaatggctgaagctttcaaagcagctaaaggcgagtaattctctgactcttcgggatttttattccgaagtttgttgagtttacttgacagattgcaggtttcgtcctgtaatcaagcactaagggcggctacggccgcccttaatcaatgcagcaacagcagccgcttaatttgcctttaaggaaccggaggaatcatgaccaagtcagaattgatagaaagacttgccacccagcaatcgcacattcccgccaagacggttgaagatgcagtaaaagagatgctggagcatatggcctcgactcttgcgcagggcgagcgtattgaaatccgcggtttcggcagtttctctttgcactaccgcgcaccacgtaccggacgtaatccgaagactggcgataaagtagaactggaaggaaaatacgttcctcactttaaacctggtaaagaactgcgcgatcgcgccaatatttacggttaagttttttactcaaacttgaacgagagaaaagcacctgtcgggtgcttttttcatttctctaatctggaactggaagctgcctcgcagagttttgaacagttttcaccctttcgttaaattcttctgaatatgcctcggggaacgcaaaattcccaccagacaaccgctcaacaaagttgcacactttccataaacagggaggggtgcatgaaaataacgacagtcggtgtatgcataattagcggaatttttccgttgctgattttgccccaattgcctgggacattaacccttgcgtttctgactctcttcgcctgcgtactggcatttatccctgttaaaaccgtccgttatatcgcgctgacgttgctgtttttcgtttggggcatattatcagcaaagcaaattttgtgggcaggagaaaccttaactggcgcgacgcaggatgcaattgttgagatcactgcaactgacggcatgaccactcattacggtcaaattactcatctacaaggtcgacgtatattccctgcgtcaggtctcgtgatgtatggcgaatatcttccgcaagcggtttgtgctggacaacaatggtcaatgaaactcaaagttcgtgcagttcatggccaacttaatgatggcggctttgatagccagcgttatgccattgcccagcatcagccgctcaccggccgttttctgcaggcaagtgtcattgaaccgaattgtagcctgcgtgcacagtatctggcgtcactacaaacaacgctgcaaccctatccgtggaatgcggttattcttggtttaggtatgggggaacggttatccgtccccaaagaaatcaaaaatatcatgcgcgatactggaacggcgcatttaatggcgatatcgggattgcacatcgcttttgcggcgttgctggctgccggactcattcgcagtggacaaatttttctgcctgggcgctggatccactggcaaataccattaattggcggaatctgctgtgctgctttttatgcctggttgacgggaatgcaacctcctgcattgcgtaccatggtggcgcttgctacgtggggaatgcttaagttaagtgggcgacagtggagtggctgggatgtatggatatgttgtctggcggcaattttgctgatggatcctgttgccattctctcgcaaagtttatggctctctgccgctgcggtcgcggcattgatattttggtatcagtggtttccctgtcctgagtggcaactgccgccggtattgcgtgcagttgtttccctcatccatctgcaactgggaatcacacttctgcttatgcccgtgcaaatcgtcatatttcatggcattagtctgacctcgtttattgcaaatctattagcaattcccttggtgacatttatcacggttccgttgatcctcgccgcgatggttgtgcatttaagcgggccgttaatcctggagcaagggttatggtttcttgccgaccggtctttggctttacttttctgggggttaaagagtttgccggaagggtggatcaacattgctgaatgttggcaatggctatcattttccccatggttcttactggtggtatggcgattaaacgcctggcgaacgttgccagcaatgtgtgtggctggaggcttgctgatgtgctggccgctgtggcaaaaacctcgacctgacgagtggcagctgtacatgcttgatgtcgggcaagggctggcaatggtgatagccagaaacggcaaagcgattctctatgacacaggactggcctggcctgaaggggatagtgggcaacaactgattatcccctggctccactggcataatcttgaaccggaaggcgttattctgagccatgaacatctggatcaccggggagggctggattcaatattgcatatatggccgatgttatggatcagaagtccgttaaactgggaacatcatcagccctgtgtgcgtggcgaagcgtggcaatggcaaggattgcgtttcagcgcgcactggcctttacaaggtagcaacgataaaggaaataaccattcctgtgtggttaaggttgatgacgggacgaatagcattcttctaaccggtgatattgaagccccagctgaacaaaagatgctaagccgttactggcagcaagtgcaggcaacattgcttcaggtacctcaccatggcagtaatacctcatcatcgttgccattaattcagcgagtgaatggaaaagtggcactcgcatcggcatcgcgctataacgcatggcgactgccctctaacaaagttaagcatcgctatcaactgcaaggatatcaatggattgatactccacatcaaggtcaaacaacggtcaatttttcagcgcaaggctggcggattagcagcctcagggagcaaattttacctcgttggtatcatcagtggtttggcgtgccagtggataacgggtagaatatgcggctatttcaacaaatgctggttttttgaatgcataacgacaaagatctctctacgtggcagacattccgccgactgtggccaaccattgcgcctttcaaagcgggtctgatcgtggcgggcgtagcgttaatcctcaacgcagccagcgataccttcatgttatcgctccttaagccacttcttgatgatggctttggtaaaacagatcgctccgtgctggtgtggatgccgctggtggtgatcgggctgatgattttacgtggtatcaccagctatgtctccagctactgtatctcctgggtatcaggaaaggtggtaatgaccatgcgtcgccgcctgtttggtcacatgatgggaatgccagtttcattctttgacaaacagtcaacgggtacgctgttgtcacgtattacctacgattccgaacaggttgcttcttcttcttccggcgcactgattactgttgtgcgtgaaggtgcgtcgatcatcggcctgttcatcatgatgttctattacagttggcaactgtcgatcattttgattgtgctggcaccgattgtttcgattgcgattcgcgttgtatcgaagcgttttcgcaacatcagtaaaaacatgcagaacaccatggggcaggtgaccaccagcgcagaacaaatgctgaagggccacaaagaagtattgattttcggtggtcaggaagtggaaacgaaacgctttgataaagtcagcaaccgaatgcgtcttcaggggatgaaaatggtttcagcctcttccatctctgatccgatcattcagctgatcgcctctttggcgctggcgtttgttctgtatgcggcgagcttcccaagtgtcatggatagcctgactgccggtacgattaccgttgttttctcttcaatgattgcactgatgcgtccgctgaaatcgctgaccaacgttaacgcccagttccagcgcggtatggcggcttgtcagacgctgtttaccattctggacagtgagcaggagaaagatgaaggtaagcgcgtgatcgagcgtgcgactggcgacgtggaattccgcaatgtcacctttacttatccgggacgtgacgtacctgcattgcgtaacatcaacctgaaaattccggcagggaagacggttgctctggttggacgctctggttcgggtaaatcaaccatcgccagcctgatcacgcgtttttacgatattgatgaaggcgaaatcctgatggatggtcacgatctgcgcgagtataccctggcgtcgttacgtaaccaggttgctctggtgtcgcagaatgtccatctgtttaacgatacggttgctaacaacattgcttacgcacggactgaacagtacagccgtgagcaaattgaagaagcggcgcgtatggcctacgccatggacttcatcaataagatggataacggtctcgatacagtgattggtgaaaacggcgtgctgctctctggcggtcagcgtcagcgtattgctatcgctcgagccttgttgcgtgatagcccgattctgattctggacgaagctacctcggctctggataccgaatccgaacgtgcgattcaggcggcactggatgagttgcagaaaaaccgtacctctctggtgattgcccaccgcttgtctaccattgaaaaggcagacgaaatcgtggtcgtcgaggatggtgtcattgtggaacgcggtacgcataacgatttgcttgagcaccgcggcgtttacgcgcaacttcacaaaatgcagtttggccaatgatcgaaaaaatctggtctggtgaatcccctttgtggcggctattgctgccactctcctggttgtatggcctggtgagtggcgcgatccgtctttgctataaactaaaactgaagcgcgcctggcgtgcccccgtaccggttgtcgtggttggtaatctcaccgcaggcggcaacggaaaaaccccggtcgttgtctggctggtggaacagttgcaacagcgcggtattcgcgtgggggtcgtatcgcggggatatggtggtaaggctgaatcttatccgctgttattgtcggcagataccacaacagcacaggcgggtgatgaacctgtgttgatttatcaacgcactgatgcgcctgttgcggtttctcccgttcgttctgatgcggtaaaagccattctggcgcaacaccctgatgtgcagatcatcgtaaccgacgacggtttacagcattaccgtctggcgcgtaatgtggaaattgtcgttattgatggtgtgcgtcgctttggcaatggctggtggttgccggcggggccaatgcgtgagcgagcggggcgcttaaagtcggttgatgcggtaatcgtcaacggcggtgtccctcgcagcggtgaaatccccatgcatctgctgccgggtcaggcggtgaatttacgtaccggtacgcgttgtgacgttgctcagcttgaacatgtagtggcgatggcggggattgggcatccgccgcgcttttttgccacgctgaagatgtgtggcgtacaaccggaaaaatgtgtaccgctggccgatcatcagtctttgaaccatgcggatgtcagtgcgttggtaagcgccgggcaaacgctggtaatgactgaaaaagatgcggtgaaatgccgggcctttgcagaagaaaattggtggtatttgcctgtagacgcacagctttcaggtgatgaaccagcgaaactgcttacgcaactaaccttgctggcttctggcaactagttacgccgcggcagcgttcgattgatggagtcatgaatgtcgctgccgcacctctcccttgctgatgcgcgtaatcttcaccttgccgcacaaggcctgttaaacaaaccccgccgtcgagcgtcgttggaggatattccggcaacgatctcccgcatgtccttgctgcaaatcgataccatcaatattgttgcccgtagtccatatctggtgcttttcagtcgtctgggaaattatcctgcccagtggctggatgagtctctggcgcgtggcgaattaatggaatactgggcgcatgaagcctgctttatgccgcgtagcgactttcgtcttattcgccaccgcatgctggcacctgaaaaaatgggctggaaatacaaagacgcctggatgcaggaacatgaggcggaaattgcacagttaattcagcatattcatgataaggggccggtacgttcagccgattttgagcatcctcgtaaaggtgcaagcggctggtgggaatggaagccgcataaacggcatctggaaggtttatttactgccggaaaggtgatggtgattgaacggcgcaacttccagcgcgtttatgatttaacccaccgtgtcatgcctgactgggatgatgagcgcgatctcgtttcgcaaacagaagcagaaatcatcatgctggataacagtgcgcgtagcctgggaatattccgcgaacagtggctggcagattactatcggctgaaacgtccggcactggcggcgtggcgcgaagcgagggctgaacagcagcaaatcattgctgtgcatgttgaaaaattgggcaatctttggctgcatgatgatttgctgccgctactcgagcgagcgctggccggaaagctcactgcaacgcacagcgcggtactttcgccttttgatcctgttgtctgggatcgcaaacgcgcagagcagctttttgattttagctaccggctggagtgctataccccagcgccgaaacgccagtatggctattttgttctgccgttattacatcgtgggcaattagttgggcgaatggatgccaaaatgcatcgccagacaggcatccttgaagttatctctctgtggttacaggaaggtattaaaccaacgacaacgctgcaaaaagggctacgtcaggcgattactgatttcgctaactggcagcaggcaacgcgggtgacattaggatgctgcccgcaaggcctctttactgattgccgcaccggctgggaaatagaccccgtcgcataaatgattatgataagatttatgcattcataacccgatccatctggaggaactatggatcatcgtctgcttgaaatcattgcctgcccggtttgcaacggaaaactttggtataaccaggaaaaacaagagcttatttgcaaactggacaacctcgctttcccgctgcgtgatggcattccagtgttgctggaaacggaagcccgcgtgctgactgctgatgagagtaaatcatgagttttgtggtcattattcccgcgcgctacgcgtccacgcgtctgcccggtaaaccattggttgatattaacggcaaacccatgattgttcatgttcttgaacgcgcgcgtgaatcaggtgccgagcgcatcatcgtggcaaccgatcatgaggatgttgcccgcgccgttgaagccgctggcggtgaagtatgtatgacgcgcgccgatcatcagtcaggaacagaacgtctggcggaagttgtcgaaaaatgcgcattcagcgacgacacggtgatcgttaatgtgcagggtgatgaaccgatgatccctgcgacaatcattcgtcaggttgctgataacctcgctcagcgtcaggtgggtatggcgactctggcggtgccaatccacaatgcggaagaagcgtttaacccgaatgcggtgaaagtggttctcgacgctgaagggtatgcactgtacttctctcgcgccaccattccttgggatcgtgatcgttttgcagaaggccttgaaaccgttggcgataacttcctgcgtcatcttggtatttatggctaccgtgcaggctttatccgtcgttacgtcaactggcagccaagtccgttagaacacatcgaaatgttagagcagcttcgtgttctgtggtacggcgaaaaaatccatgttgctgttgctcaggaagttcctggcacaggtgtggatacccctgaagatcttgagcgcgttcgcgctgaaatgcgctaatttcacttcacgacacttcagccaattttgggaggagtgtcgtaccgttacgattttcctcaatttttcttttcaacaattgatctcattcaggtgacatcttttatattggcgctcattatgaaagcagtagcttttatgagggtaatctgaatggaacagctgcgtgccgaattaagccatttactgggcgaaaaactcagtcgtattgagtgcgtcaatgaaaaagcggatacggcgttgtgggctttgtatgacagccagggaaacccaatgccgttaatggcaagaagctttagtacgcccggaaaagcccgacaactggcatggaaaaccaccatgctggcaagaagtgggactgtccgtatgccgactatttatggtgtgatgacgcatgaagaacaccccggccccgatgtcctgctactggagcggatgcgtggtgtttcggtggaggcaccagcccgaacaccagaacgctgggaacaactcaaagaccaaatcgttgaagccttactggcctggcaccgtcaggacagtcgcggttgcgtcggcgcggtcgacaatactcaggaaaatttctggccctcatggtaccggcaacatgttgaagtgctatggaccacgctcaatcagttcaataacaccggtctgacgatgcaggataagcggatcctgtttcgcactcgcgaatgtctcccggcattatttgaaggctttaacgacaattgtgtgctgattcacggtaacttctgtttacgcagcatgttgaaagattcgcgcagcgatcagttactggcgatggtcgggccgggactaatgctttgggcaccgcgagaatacgaactgttccgactaatggataattctctggcggaagatttgctctggagttacctgcaacgcgcgccagtggcggagtcgttcatctggcggcgttggttgtatgtgttatgggatgaagttgcgcaactggttaataccggacgatttagtcggcgcaacttcgatctggcatcaaaatcactcttgccgtggctcgcctgacgaaccttttagccactgccagatacggccaagcgtttcatagccaacacgatcgctatgcatcaaccagaccggagaagggattgcccgttcccacgggttaagcggcgagtcgatggccaactgattcgccggggctggtagcggatttaacccttcctgctgaaaaaagatcatcgcccgcggcagatgtgatgcggaggtcaccagcaggaaaggggcgtcaccaatcgcctgtttcactgctgcagcttcttcttcggtatcttttggcaaatccagggtgataatttgctcgcgcggcacgcccagcgattgcgcaactctggcacctacttccgctgtactcaccgtattggtttttgctacgcctcccgtgaagatcagttttgatcccggattttcgcgccataagcgaataccttcattcaggcgtggcagactgttattgattaaattagagctcggtgcccactgcgggttccaggtataaccacctccgagcaccacgatatagtccactttttgcgaattattccatgtcggataggtgctttcgatgggacgcagcaggcggtcggctaccggttgcaaactcaataacaagagcgccagccacccaatgctaataaaaatcttcccggttttttgaaaacggctaaaccacagcagcgccaggccagcgccaataatcaacaacatcagcggaagtggcagcaacatattgccaatcacttttttcagtgtaaaaagcatcctttctggttccttttttaaccatatagcaagggatcgccagcgatattacaccagacgggttcattctcgccgtggctgtgacaaaatagcgtctttatcagaaaacgtcttagccaaccggtggagaaagcaatgcaggatcgcaattttgatgatattgcggaaaagttttcccgtaacatttacggcaccaccaaagggcagcttcgacaggctattctgtggcaggatctcgatcgcgtgctggcggaaatgggcccgcaaaaactgcgtgtgctggatgctggcggtggagaagggcagaccgcaatcaaaatggccgagcgtgggcatcaggtcattttatgcgatctttctgcgcagatgatcgaccgcgcaaaacaggcggcagaagcaaaaggtgtgagcgacaacatgcaatttatacattgcgccgctcaggatgttgcttcgcatttggaaacgcccgttgatctgatattgttccatgcggtgctcgagtgggtggctgatccccgcagcgtattgcagaccctctggtcagtgttgcgtccaggcggcgtgttgtcgttaatgttctacaatgcgcatggtttgttgatgcataacatggtcgccgggaattttgattacgtgcaggcgggaatgccgaaaaagaaaaaacggacgctttcgccagattatccacgcgacccggcgcaggtttatctgtggctggaagaagctggttggcaaattatgggtaagacaggcgttcgcgtgtttcatgattatctgcgcgagaaacaccagcagcgcgactgctatgaagcattacttgaattagaaacgcgttattgccgtcaggaaccgtatattaccctggggcgttatattcatgtcaccgcgcgcaaaccgcagagcaaggataaagtatgagtgaattttcccagacagtccccgaactggttgcctgggccagaaaaaatgacttctccatctcgctgccggtagaccgactctcttttctgctggcggttgccacgctgaacggcgagcgtctggatggtgagatgagtgaaggcgagctggtggatgcattccgccatgtgagtgatgcgtttgagcaaaccagcgaaaccatcggcgtgcgcgccaataacgcgatcaacgacatggtgcgtcaacgtctgctgaaccgctttaccagcgagcaggcggaagggaacgcaatttaccgtctgacgccgctcggcatcggcattactgactactacatccgtcagcgcgagttttctacgctgcgtctttctatgcagttgtcgattgtggcgggtgagctcaaacgcgcagcagatgccgccgaagagggcggtgatgaatttcactggcaccgtaatgtctatgcgccactgaaatattcggtagcagaaattttcgacagtatcgacctgacgcaacgtctgatggacgaacagcagcagcaggtgaaggacgatatcgcccagttgctgaacaaagactggcgggcggcgatttccagctgtgaattgttgctttcggaaacttccggaacgctgcgtgaattgcaggatacgctggaagcggcaggcgacaaattgcaggctaatctgttgcgcattcaggatgcgacgatgacccatgacgatctgcatttcgtcgatcgtctggtgttcgatctgcagagcaaactcgatcgtattatcagttggggccagcaatccatcgacttgtggattggctacgaccgccacgtacacaaatttattcgtaccgcgatcgatatggataaaaaccgcgtctttgctcagcggttacgtcagtcggtacaaacctattttgatgagccgtgggcgctaacttatgccaatgccgatcgtctgctggatatgcgtgacgaagagatggcactgcgcgatgaagaagtgactggggaacttcctgaggatctggaatacgaagagtttaacgagatccgcgaacagctggcggcgatcatcgaagaacaacttgccgtgtacaaaaccagacaagtgccgctggatcttggtctggtggtacgcgaatatctgtcacagtatccgcgtgcacgtcactttgacgttgcgcgtattgttattgatcaggcggtacgtcttggcgtagcgcaagcagatttcaccggactgccagcgaaatggcagccgattaatgattacggagccaaggtacaggcgcatgtcatcgacaaatattgaacaagtgatgccggttaagctggcgcaggcgctggcgaatccgttatttccggcgctggacagcgccttacgttcaggacgccatattggcctcgacgaactggataatcatgcattcctgatggattttcaggaatatctggaagagttttacgcgcgttataacgttgagcttattcgcgcaccagaagggttcttctatttacgcccacgttccaccacgctgatccctcgttccgtcttgtcggaactggatatgatggtcgggaaaatcctctgttatctctatctcagcccggaacggctggcgaatgaggggattttcacccagcaggaactgtacgacgaactgctcaccctggccgatgaagcaaaactgctgaaactggtgaacaaccgttcaaccggttcagacgttgaccgtcagaagttgcaggagaaagtacgttcttcgctcaaccgtctgcgtcgtttaggcatggtgtggtttatgggccacgacagcagcaagtttcgcattaccgaatcggtgttccgcttcggagccgatgtgcgtgctggcgacgatccccgtgaagcacagcgtcgcctgattcgtgatggcgaagcaatgccgattgaaaatcatctgcaactcaacgatgaaaccgaagagaatcagccagatagcggagaggaagaataatgattgaacgcggtaaatttcgctcactgacgctgattaactggaacggcttttttgcccgaacttttgaccttgacgagctggtcacgacgctttctggcggtaacggggcgggtaaatccaccaccatggcggcgttcgttacggcgctgatccccgacctgaccctgctgcatttccgtaacactacggaagccggggccaccagcggttcgcgcgataaaggtctgcacggtaagctgaaagcgggtgtctgttattcgatgctcgacaccattaactcgcgccaccagcgcgtggtggtcggtgtgcgtctgcaacaggttgccggacgcgatcgtaaagtggatatcaagccgtttgccattcagggactgccgatgtcggtgcagccgacacagctggtgaccgaaaccctgaacgaacgccaggcgcgcgtgctgccgcttaacgagctgaaagacaagctcgaggcgatggaaggcgtgcagtttaaacagttcaactccattactgattaccactcgctgatgttcgatctgggcatcatcgcgcgtcgtctgcgctccgcatctgaccgtagcaaattctatcgtctgatcgaagcttcgctgtatggcgggatctccagtgccattacccgttctctgcgcgactacctgttgccagaaaacagcggcgtgcgtaaagcgttccaggacatggaagcggcgctgcgtgaaaaccgtatgacgctggaagcgattcgtgtcacccagtcggaccgcgacctgtttaagcatctgatcagcgaagccaccaactacgtggcggcggactacatgcgtcacgccaacgagcgccgtgtccatctcgacaaagccctggagtttcgtcgcgagctacatacttcgcgtcagcaactggcggctgagcagtacaaacacgtcgatatggcgcgtgagctggcagagcacaacggtgccgaaggcgatctggaagcggattatcaggcggccagtgatcacctgaacctggtgcaaaccgcactgcgtcagcaggagaagatcgaacgctacgaagcggatctcgatgagctgcagatccgtctggaagagcaaaatgaagtggtggcagaagccatcgaacgccagcaagagaatgaggctcgtgcggaagctgccgaactggaagtggacgagctgaaaagccagcttgctgactaccagcaggcgctggacgtccagcaaacgcgcgcgatccagtataaccaggcgattgctgcgcttaatcgtgccaaagaactgtgccatctgccggacttaaccgccgactgcgccgccgaatggctggaaaccttccaggcgaaagagctggaagcgactgaaaaaatgctctctcttgagcagaaaatgagcatggcgcaaaccgcgcacagccagtttgagcaggcttatcagctggtggtggcaatcaacggcccactggcgcgtaacgaggcgtgggatgtcgctcgcgaactattgcgcgaaggggtcgatcagcgtcacctggcagagcaggttcagccgctgcggatgcgattaagcgaactggaacagcgtctacgcgagcagcaagaagctgagcgtctgctggcagatttctgcaaacgtcagggcaagaattttgatatcgacgaactggaagccctgcatcaggaactggaagcacgcattgcctctctttccgatagcgtgtctaacgcccgtgaagagcgcatggcactgcgccaggagcaggaacagctgcagtctcgcattcagagtttgatgcagcgtgcgccggtttggctggcagcgcaaaacagtctcaaccagttgagcgaacagtgcggcgaagagtttacctccagccaggacgtcaccgaatatctgcaacagttgctggagcgtgagcgagaggcgattgttgaacgcgatgaagtgggcgcgcgcaaaaacgccgtcgatgaagagatcgaacgtttaagccagcctggcggctctgaagatcagcgtctgaacgcgctggcggagcgttttggtggtgtgctgctgtcagaaatttatgacgacgttagcctggaagatgcgccgtacttctcagcgctgtatggcccgtcacgccacgccatcgtggtgccagatctgtcacaggtaactgaacacctggaaggcttgaccgattgcccggaagatctctatctgatcgaaggagatccgcagtcattcgatgacagcgtgttcagcgttgatgagctggaaaaagcggtagtggtgaaaatcgccgatcgtcagtggcgttattcacgtttcccggaagtgccgctgtttggtcgtgctgcgcgtgaaagccgtattgaaagcctccatgccgagcgtgaagtgctttccgaacgcttcgccacgctctcctttgatgtacagaaaactcagcgtctgcatcaggcgttcagccgctttatcggcagtcatctggcggttgcgtttgagtctgacccggaagcagaaatccgtcaactgaacagccgtcgcgtcgaactggagcgggcgttaagtaatcatgaaaatgataaccagcagcagcgtattcagtttgagcaggcgaaagagggcgttacggcgctgaaccgcattctgccgcgtctcaacctgttggctgatgacagcctggcggatcgcgtcgatgaaatccgcgaacgtctggatgaagcccaggaagccgcgcgttttgttcagcagtttggcaatcaactggcgaaactggaaccgattgtttcggtattgcagagcgacccggaacagttcgaacagttaaaagaagattacgcgtactctcagcagatgcagcgcgatgcccgtcagcaggcgtttgccctgacggaagtggtgcagcgtcgtgcgcactttagctattctgactcggcagaaatgcttagcggtaacagcgatctcaacgaaaaactgcgtgaacgtctggaacaggcggaagcggagcgtacccgcgctcgcgaagcgttgcgcggtcacgcagcgcagttgagtcagtacaaccaggtgctggcttcgctgaaaagttcttacgacaccaaaaaagagctactcaacgatctgcaacgtgaattgcaggatatcggcgtgcgtgctgatagcggggcagaagagcgggcgcgtattcgccgtgacgagctgcatgcgcaactgagcaataaccgttcacgccgcaatcaactggaaaaagcgcttaccttctgcgaagcggagatggacaacctgacccgcaaactgcgcaagctggagcgggattactttgagatgcgcgagcaggtagtgaccgccaaagcgggctggtgtgcggtgatgcgcatggtgaaagataacggcgttgagcgccgcttacaccgtcgtgagctggcttatctctccgctgatgatttgcgttccatgtcggataaggcgttaggtgcgctgcgtctggcggtggcggataacgaacatctgcgcgacgtgctgcgcatgtcggaagatccgaaacgtccggagcgtaaaattcagttcttcgtggcggtttatcagcatctgcgtgaacgtattcgtcaggatattattcgtaccgatgatccggtggaagctatcgaacagatggagattgaacttagccgtctgaccgaagaattaacctcccgtgaacagaaactggcgatcagttcccgcagcgtggcgaacatcattcgcaaaaccattcagcgcgagcagaaccgtatccgtatgctcaaccaggggttgcagaacgtatcgtttggtcaggtgaacagcgtgcgtctcaacgtgaacgtgcgtgaaacgcacgccatgctactggatgtgctctctgaacagcacgagcagcatcaggatctgtttaacagcaaccgtttgaccttctcggaagcgctggcgaaactgtatcaacgtcttaacccgcagattgatatggggcagcgcacgccgcagaccatcggtgaagaactgctggattaccgcaactatctggaaatggaagttgaggttaaccgtggttccgatggctggctgcgcgcagagtctggtgcattgtcgaccggtgaggcgattggtaccggtatgtcgattctggtgatggtggtacaaagctgggaagatgaatctcgccgcctgcgcggtaaagatatctctccttgccgcctgctgttcctcgatgaagcagcgcgactggatgctcgttctatcgccacgctgtttgaattgtgtgagcgtttgcaaatgcaactcatcatcgcagcgccggaaaatatcagcccggagaaaggcaccacctataaactggtgcgtaaagtcttccagaataccgaacacgttcatgtcgtcggcctgcgaggatttgcgccgcaactccctgaaacgcttccaggaactgacgaagcgccttctcaggcgagttaaaattaaggcggcagcaatgccgccttttctttttccgaaaactccgtttctgcactaaaaaagtggcacattacggcgcgcttttctttaaacttctttacattaggttatgtaaaaacgtatcggcgtttatatactgaagataagcctgatgagtaacaggcttgctcgtcatactttcgtgagtattggcgttgtacaggcaagtcgtaaaataacagcctggctattcagagtatgataaaaacagggggcaagggatgttgcttaatatgatgtgtggtcgtcagctgtcggcaatcagtttgtgcctggccgtaacattcgctccactgttcaatgcgcaggccgatgagcctgaagtaatccctggcgacagcccggtggctgtcagtgaacagggcgaggcactgccgcaggcgcaagccacggcaataatggcggggatccagccattgcctgaaggtgcggcagaaaaagcccgcacgcaaatcgaatctcaattacccgcaggttacaagccggtttatcttaaccagcttcaactgttgtatgccgcacgcgatatgcaacccatgtgggaaaaccgtgatgctgttaaagccttccagcaacagctggcagaggtggcgattgccggtttccagccgcagtttaataaatgggtagagttactgaccgatcctggtgttaacgggatggcacgcgacgtggtgctctctgatgcgatgatgggctatctccatttcattgcaaatattccggtcaaaggcactcgctggctatatagcagtaaaccttatgcacttgcaacgccgccgctctcggtgattaaccaatggcagctggcgctggataaaggtcaattgcctacgtttgttgcaggactggcaccgcagcatccgcaatatgcggcgatgcatgaatcgttactggccttactctgtgacaccaaaccgtggccccaactgaccggcaaagcaacgttgcgcccagggcagtggagtaacgacgtaccggcgttgcgcgaaatattgcaacgcacaggcatgttggacggggggccgaaaattactctacctggcgatgacacgccaactgacgcggtagtcagcccatccgctgttactgttgaaacagcagaaactaagccgatggataagcaaacgacgtctcgtagtaaacctgcgcctgccgttcgcgccgcctacgataatgaactggtggaagccgttaaacgttttcaggcatggcaaggattgggggcagatggtgctattggcccggcaacacgtgactggttaaacgtaacgcccgcccagcgtgctggtgtgttggctctcaacatccagcgattgcgcttgctgccaacagagctttctaccgggatcatggttaacattccggcctattcgctggtctactatcagaacggcaatcaggtgctggattcgcgagtcattgtcggtcgccccgatcgcaaaacgccgatgatgagcagtgcccttaacaacgtagtggtaaacccgccgtggaacgtacctccaactctggcacgcaaagatattctgccaaaagtgcgcaacgatccgggatatctcgaaagccatggctatacggtgatgcgcggctggaacagcagagaagcgattgacccatggcaggttgactggtctacaatcacggcctcgaatttaccgttccgcttccagcaggctccaggcccacggaactcgctggggcgctataaattcaatatgccgagttcagaggccatttatttgcatgacacgccgaaccacaatctgttcaagcgtgatacacgcgcattgagctcaggctgtgtacgagtgaataaagcttccgatctggcgaatatgctgttgcaggatgcaggctggaatgacaaacgtatttctgatgcgctgaagcagggtgatacacgttacgtcaatattcggcagtcgattccggtgaatctctactacctgacggcctttgttggtgcagatggtcgtacccagtatcgtacagatatttacaattatgatctgcctgcgcgatccagctcgcaaatcgtatcgaaagcggaacaattaatcaggtaaatgaagtagttcggggaaatcagttgtcgtaataattagcatgattgggggcgattctctgcagcccccgtcactgctggggttgagtcatcttgacgtctgctttacgggcggttaaggtgcctcttgtgcgccagaagtgcatataaacgataacattgacctgtagacttgattatcatggacaaattcgacgctaatcgccgcaaattgctggcgcttggtggcgttgcactcggtgccgccatcctgccgacccctgcgtttgcaacactctctaccccacgcccgcgcattttgacactcaataatcttcataccggagagtcaatcaaagcggagtttttcgatggcagaggctatattcaggaagaattggcaaaacttaaccattttttccgcgattaccgcgcgaacaaaataaagtccatcgacccaggattattcgaccagttgtatcgcctgcaagggttgttaggcacgcgcaaaccggtgcaactcatttccggttatcgttctattgataccaacaatgaactacgcgcccgcagccgtggagtagcgaagaaaagctatcacactaaaggccaggcgatggatttccatattgaaggtatcgcgttaagcaatattcgcaaagccgcgttatctatgcgcgcaggtggtgtaggatattatccacgtagtaactttgtgcatattgataccgggccagcacggcactggtagtaattgcttaacgaaacaggggcagtatgaactatcgtattattccggtcaccgcattctcccagaactgttcattaatctggtgtgaacaaacccgtctggccgcactggtcgatcctggcggcgatgcggaaaaaatcaaacaggaagttgatgacagcggcctgacactgatgcagatcctgctgacgcatggtcatctggaccacgttggcgcagcggcggaactggcgcaacattacggcgtgccggttttcggcccggaaaaagaagatgagttctggctgcaaggcttgcctgcgcaaagtcgtatgtttggtctggaagagtgccagccgctgacgccagatcgttggctgaacgaaggcgataccatcagcatagggaatgtgactttacaggtgttacattgccctgggcatacgccgggtcatgtcgtgttttttgatgatcgggcaaagctgctgatttctggcgatgttattttcaaaggcggagtagggcgcagtgacttcccgcgtggcgatcataatcaactgatttcttcaatcaaagataaattgctgccactgggggatgacgtgatatttattccgggtcacggaccattatccacacttggttatgaacgcctgcataatcccttcctgcaagacgaaatgcccgtctggtaaggcacataaaaaagcccgcttttaatgctggcctggatttctggcaaagtgcgctttgtttatgccggatgcggcacgagcgccttatccggcctacaaaatcgtgcaaattcaaaatattgcaggggacgcgtaggcctgataagcgtagcgcatcaggcaatgttgcgtttgtcatcagtctcagcccgcttttcagcgggcttcattgtttttaatgcttacagcactgccacaatcgcttcgcacagcggagccatgttatctggtgtcatcccggccacatttacgcgaccagaagcaaccgcatatacgccaaactcttcgcgcagacgcagcacttgttcttttgtcaggccactgaaggagaacatgccgttctgtttgatgataaagctgaagtcgcggtttgcgcctttttcctgcagcgtattgacgaacaactgacgcatacgctgaatacgctggcgcatatcagtcagctcttgttcccaaatcgcacgtaacgcatcgttgctcaggatggtggcaacaacagaagcgccgtgtgctggtgggttagagtagttagcgcgaatcgccgctttcatttggctgaatgcgcgatcaacggtttcactgtcggcagcaaccagagtacaagcgccaacacgctcgttgtacaggccaaagtttttagagtaggaactggcaacaatcagctctttatgcatagccgcgaaagcgcgcagtccttcagcatcttcttccagaccacgggcaaaaccctggtaagcgaagtcaaacagcggtaaccagcctttctcaacggagagttgtgccagtgtttgccattgttccagcgtagggtcgataccggttgggttatggcagcagccatggaacagcactacgtcgccagcctgagcttcattcaggctgttaatcagtgcatcgaagtcaagagtgtgattttccgcatcataataagcgtattcacgaacttccagacctgcagagttaaagacgctcttatggttcggccagcttgggttgctcacccacacacgcttaacgctggtattttttgccaggaaatcggcagccacgcgtagtgcgccagtgccccccggagtctgtgccgtgcgagcacgtttgtcattgatcagggcgctacctttaccaaacagcagttcctgagtgcagcgaccaaattcagggatgccgtcaatgccgaggtaatttttggtggtttcattttcgagcagatactgttcagcctttttcacgctggtcagtaccggggttttgcccgtctcatctttatagacaccaatcccgaggttaattttgccgggacgttcatcggcacgaaacagatcggccaggcccagaatcgggtcggcaggagcggcggtaatgttctcaaacatgacgaggttccattatggttacagaagggaagtccgctatcagggtaacgggagatttacaaaattccaactattactgatgaaaacgcaggctgtttttgcaagacgtgagattgctctggaaggtataaaaaaaacaggaccaaagtcctgttttttcggcatttaacaaagaggtgtgctattagaactggtaaacgatacccacagcaacggtgtcgtctgaacctacgcccagtttgttgtcagaatcgatctggttgatgatgtagtcaacataggtggacatgtttttgttgaagtagtaggttgcgcccacttcaaagtagttcaccagatcaacatcaccgataccttctacgtctttcgctttagatttggtgtaagcgatggacggacgcagaccgaaatcgaactggtattgcgcaactaacagaacgtcttgcgttttgttggcgaagccgctggtgtttgtaaatttattagtgatcggcgtagcgttacgggtttcaccgtagttcgctgccaggtagatgttgttcgcgtcgtacttcagaccagtagcccactgttcagcttttttaccgttgccaagaggttgagcttcttgcaggttggtacggtcagctgcaccataagcaccaacgataccaaagccttcgtattcgtagctgatagaaccgccaacaccgtcgccgttagaacggcgtgcagtgtcacgctcgtttttacccaggtactgaacagcgaagttcaggccatcaaccagaccaaagaagttggagttacgataggtagcaacgccgccaacacgaccaacgaagaagtcatcgctgtatgcagtatcaccaccaaattctggcagcatatcggtgtaacccagtgcatcataaaccacaccgtagttacggccgtaatcgaaagaaccaacgtcagcgtatttaagacccgcgaatgccagacgcgttttgttaccagtttgagcgtcagcgccttcagagttgttaccctggaagttatattcccactgaccataaccggtcagatcggaattgatttgagtttcccctttaaaaccaagacgggcataggtcatgtcgccattgccaccgtaactgttttcaccgttacccttggaaaaataatgcagaccaacagctttaccgtacagatctactttgttgccatctttgttatagatttctgcagcgtttgcagtacctgctactaacagagcagggacgatcactgccagaatattgcgcttcatcattatttattaccctcatggttttttttatgacacctgccactgccgtcaataagttctgtcaataaaaatttacggaactattgatgagagtttggtgtctttatgtgtctgcaggcatctttccattcaaactaacgtttcgctaccgtgaaagtgctacaaagataaagatttggtttcaaaaagaaaaaatatgtaaccaaaagtaaaatttaaggaactttgtgaacaccgtcatatttccatagagacgtgatgatatttacagcaattttaatctatttatatgatttccttatatttaaattaactaaacggaaattttgtttctgatggaaactttatcgacctggcacaaaatcttctttcagacatccagaatgccaaaaaatagtatgaaaattgtgctattagctaagaaaaaactaatccgcaataagaatgcggattagtttttgcgcgtaaatgttgcaatgtaatattccgtaacaggatgatcgttatggcggggttgcaaatagattgcttgacttaacaaacagataacttgacagaaaagataaaaaaagagccagcgggcgctggctcttgaagacgctaaattagaagctggcgttacgcggagtacgtgggaacggaatcacatcacgtacgttttgcacgccagttacgtaagcaatcagacgttcaaaaccaagaccgaaacctgaatgcggaacagtaccgtagcgacgcagatcgcgataccaccagtaatcttctttattcaggcccatttccagcatacgctcgtccagcacgtccagacgttcttcacgctgggagccaccaatgatctcaccgatgcccggagccagaacgtccatagccgcaacggttttaccgtcttcgttaaggcgcatatagaacgctttaatatctttcggatagtttttaaccactaccggtgctttaaagtgttcttccgccagataacgctcatgctcagaagagagatcgactccccagtaaaccgggttttcaaacttcctgccgcagttttcgagaatggtcactgcgtcggtataatccacctgcgcaaaatcggcttcaatgaagcgttccagacgtgaaacggcatctttatctacgcgttcagcgaagaatttcatgtcgtcagcgcgttcttcgagaaccgctttgaagacatatttcagcatggcttcagccagacccgcaatatcgttcaggttagcaaacgccacttccggctccagcatccagaattccgccaggtgacggctggtgttggagttttcagcacggaaagtcgggccgaaggtataaattttggacaatgcgcaagcgtaggtttcgccgttcaactggccagatacggtcaggaaagactctttaccaaagaagtctttgtcgaaatccactttgccctgatcgttacgcggcaggttttccagatccagcgtagaaacgcggaacatttcgcctgcaccttcggtatcagatgcggtaatcagtggcgttgaaacccagaagaatccctgctcgttaaagaagcgatgcagcgcctgcgccagcgtatggcgaacgcgcgcgacggcaccaatcaggtttgtgcgcggacgcaggtgagcgacttcacgcagatactcaatgctgtggcgttttgccgccatcgggtaagtgtctggatcttcaacccaaccagcaacttcaaccttgctggcctgaatttcaaattgttgcccctggcccggcgacgccacgactttacccgtcacaatgaccgagcagccggtggtcagacgcaggacgtcttcattgtaattgggcagagaattattgatgacagcctgtacaggatcaaagcaggaaccgtcataaacggcgaggaaggagatgccagcttttgaatctcggcgggtacgtacccatccgcgcacggtgacttcgctgtcaacggctacacggccctggagtacgtcggctacaggcacaacgctcataatattctctctgttaatagtcggaaaaaataaacacttgtccacccgtaaatggggggatacctatgttacctggcatctgcaatcagacaagcagaattcgcaaatgcagcgaaagatttcggaattaaaggtaaaaaaagggagccgattagctccctgatgatattaactggcttttttaatatgcggaaggtcgaacgctttgcgcagcgcccgaacaaacgctttatcatggcagatagttttgccagggctgtcagaaagtttcgccaccggtttaccgttacactctaccaacttaatgacaatattcaggggttttacctgggggatatcgcaggtcaggcgagtcccaataccaaaacttaattgcacgcgggaagagaagtggcggtatagctcaaccgctttgcgtaaatccagattgtcagagaaaaccagcgttttactctgtggatcaattcccagcttttcataatgtgcaatggctttttcaccccattcaaccgggtcgccagagtcatgacgcaggccctgataccgactagcgaactcgacaccgaaatcacgcaggaaagcatccatagtgatgcagtcggttaatgcaatgccaagttggtcgggatactcttccagccaggcagcaagtgcagctcgctggctgttggctagatccgggctgatttgctgatgtgcctggaaccattcgtgtgcctgtgttcccatcggcgtgagggaaagccgacgcgccagatcgtagttgctggtgcccacaaaccaggattcctgttgcagacgcttaacgatggtttcttgtacttcgcgagaaaaacggcgacgggtgccaaaatccatcagatggaagcgcgacatatcaagaccggcggttaacgccgagaagtcgactaatttgctttccagcgtgtcgagggcttgcgcaacgtcggcctgcggtgagcgatagcgatgtaccatttcactgataaccgccagcaaaggaacttcccagaggatgacttcacgccacgggccgcttaaacgaatatccagcttgccattatcgttggacacggtgacttgttccgggttaaagcggaactcgcgtaaccagttaagatagtcggccttaaagaaaggcagggcagaaagccactgatattcatcatcctgcaggcgcaggtgctgcatcgcctgaacctgttcacgaatagcatcggcataaatacccagcagatcgtcacctcggcaacgaaactccgccgcgacatgcacatcgtaatagtgatgaaacacggcttgctgcatatgcaacttataagcatctgtatccagcaacgagtgcagaacaggagaagcgaattgtgtcataggtgcgcagtagcgtcctcgtacaggagcgtttagtacaataaacatcttcaggaactgctggagtataccttgtttcgcaatttattgaaccccgatcacaccatatgccacctttctggtcgatggcattacgcggtgtatgttataaaaatgtagcaataaaggcgtttgtacctgaaaagatgaagattctgcatagcgcgatttacgcaacaggaatagactgaacaccagactctataaaagatgctaaaggttatttatgactcaacagccacaagccaaataccgtcacgattatcgtgcgccggattaccagattactgatattgacttgacctttgacctcgacgcgcaaaagacggtcgttaccgcggtcagccaggctgtccgtcatggtgcatcagatgctccccttcgtctcaacggcgaagacctcaaactggtttctgttcatattaatgatgagccgtggaccgcctggaaagaagaagagggcgcactggttatcagtaatttgccggagcgttttacgcttaagatcattaatgaaataagcccggcggcgaataccgcgctggaagggctttatcagtcaggcgatgcgctttgcacccagtgtgaagccgaaggtttccgccatattacgtattatctcgaccgcccggacgtgctggcgcgttttaccaccaaaattattgccgataaaatcaaatatcccttcctgctttccaatggtaaccgcgttgcgcaaggcgaactggaaaacggacgccattgggtacagtggcaggacccgttcccgaaaccgtgctacctgtttgcgctggtggcaggcgactttgatgtactgcgcgatacctttaccacgcgttctggtcgcgaagtagcactggagctgtacgtcgatcgcggcaaccttgatcgcgcgccgtgggcgatgacctcgctgaaaaactccatgaaatgggatgaagaacgctttggcctggagtatgacctcgacatctatatgatcgtcgcggtggatttcttcaatatgggcgcaatggagaataaggggctgaatatctttaactccaaatatgtgctggcccgcaccgacaccgccaccgacaaagattacctcgatattgaacgcgttatcggccatgaatatttccataactggaccggtaaccgagtgacctgtcgcgactggttccagctcagcctgaaagaaggtttaaccgtcttccgcgatcaggagttcagctctgaccttggttcccgcgcagttaaccgcatcaataatgtacgcaccatgcgcggattgcagtttgcagaagacgccagcccgatggcgcacccgatccgcccggatatggtcattgagatgaacaacttctacaccctgaccgtttacgagaagggcgcggaagtgattcgcatgatccacaccctgcttggcgaagaaaacttccagaaagggatgcagctttatttcgagcgtcatgatggtagtgcagcgacctgtgacgactttgtgcaggcgatggaagatgcgtcgaatgtcgatctctcccatttccgccgttggtacagccagtccggtacaccgattgtgaccgtcaaagacgactacaatccggaaaccgagcagtacaccctgaccatcagccagcgcacgccagccacgccggatcaggcagaaaaacagccgctgcatattccgtttgccatcgaactgtatgataacgaaggcaaagtgatcccgttgcagaaaggcggtcatccggtgaattccgtgctgaacgtcactcaggcggaacagacctttgtctttgataatgtctacttccagccggtgcctgcgctgctgtgcgaattctctgcgccagtgaaactggaatataagtggagcgatcagcaactgaccttcctgatgcgtcatgcgcgtaatgatttctcccgctgggatgcggcgcaaagtttgctggcaacctacatcaagctgaacgtcgcgcgtcatcagcaaggtcagccgctgtctctgccggtgcatgtggctgatgctttccgcgcggtactgcttgatgagaagattgatccagcgctggcggcagaaatcctgacgctgccttctgtcaatgaaatggctgaattgttcgatatcatcgacccgattgctattgccgaagtacgcgaagcactcactcgtactctggcgactgaactggcggatgagctactggctatttacaacgcgaattaccagagcgagtaccgtgttgagcatgaagatattgcaaaacgcactctgcgtaatgcctgcctgcgtttcctcgcttttggtgaaacgcatctggctgatgtgctggtgagcaagcagttccacgaagcaaacaatatgactgatgcgctggcggcgctttctgcggcggttgccgcacagctgccttgccgtgacgcgctgatgcaggagtacgacgacaagtggcatcagaacggtctggtgatggataaatggtttatcctgcaagccaccagcccggcggcgaatgtgctggagacggtgcgcggcctgttgcagcatcgctcatttaccatgagcaacccgaaccgtattcgttcgttgattggcgcgtttgcgggcagcaatccggcagcgttccatgccgaagatggcagcggttacctgttcctggtggaaatgcttaccgacctcaacagccgtaacccgcaggtggcttcacgtctgattgaaccgctgattcgcctgaaacgttacgatgccaaacgtcaggagaaaatgcgcgcggcgctggaacagttgaaagggctggaaaatctctctggcgatctgtacgagaagataactaaagcactggcttgataaataaccgaatggcggcaatagcgccgccattcggggaatttacccctgttttctcaggcgagtttcagattcaccacgttgcatcacccgttgcaacacctccgcttccagctccgctaatcgcaccgaccctaatcgacgcggacgggggatatccactgtcaaatccagaccaatttttccctcttcaattaacagcacccggtcagccatcgctaccgcttcgctcacatcatgcgtcaccaacagtacggtaaagccgtgctcctgccaaagtgacacaatcaaatcctgcatctcgagtcgcgttaaggcgtccagcgccccgagcggttcatcaagcaacaataatcccggtcgatgaatcaacgctcttgccagcgccactcgctgtttctgcccgccagaaagtgcggcaggccattcccctgcgcgattctccagtcctaccgcagccaacgctcgacgtgcggcatcgcgccactggcctttaaggcctaacccaacgttatcaatcaccgatttccacggtagcagacgcgcatcctgaaacatcattcgcgtgtcttcctgaatttcagccagcggtgtggtgcccgctaacacatcgcctgcggttggcgtttccagacctgccagcaggcgcagcagggtacttttgccaccaccgctgcggcccaccaccgccacaaactgacctgccggaatatgtaaatccagttggttcaggacgatattttccgcgtaatgtttgcttactgcattgagcaacaatggcgtgccctggttcagacgagcagtattcataccgtggcctccttcaaatgataagccgggttccagcgcaaccagaggcgctctaacagctgcgcgctgacgtcagccagtttgccgagcagggcgtaaagaataatagcgactaccaccacgtccgtttgcaaaaactcccgcgcattcatcgccagataaccaatgcctgaattggcagaaatggtttcggcaacaatcagcgtcagccacatcaggcccaacgcaaaacgcacgccgaccataattgagggcagggcaccaggcaggatcacatggataaacagcggtatgccggataatccatagctacgcgccatctccaccaacccgcgatcgatattacggatgccatgccaggtgttgatataaatggggaatagcgtaccgagcgccaccagaaagatttttgcggattcatcaatgccaaaccacaaaatcaccagcgggatcagcgccagatgcggcacgttgcgcaacatctgaattgaggtatccagcagccgttctccccagcgagatagcccgctaatcagtcccaaaatcaaccccagcgatccgccaattgaaaagccaatcagcgcccgccaggagctgatcgccagatgctgccacagttcgccgctggcggagagcgtccagaacgccgtcaccactccttccggtgaaggcaaaatacgcgtcgacagccagccaaccgaggaggccagttgccacaccgccacgatgcccaccggtaaaaaccagggggcaacgcgcaataaccacttcttcactggcgttgccattatttcttccttagctttgcgcgactttacgggggataaaatcattcgccaccgcttcgccttgcggattcagcggctgcggctggggaatttccgggatggcgacatccagaagcgggaacagcaactcgccaacccgatacgcttcttccagatgcggatagcccgaaagcacaaaactgtcgatgccaagcgcggcatattcgttgattcgcgcagcgaccgtaggaccatcgcccaccagcgccgtcccggcaccgccgcgcactaagccaacgcccgcccataaattggggctgatctccagattgtcgcgcttgccgttatgtaacgccgccattcgctgttgccctacggaatccgtccgggcgaatgcggcctgtgctttggcgatagtttcatcatcaagatgcgagattaaccgctcggcggcctgccacgcttcgtcgttagtttcacgaacaatcacatgcagacgaataccgaaacgaattttgcgtccatgcgcggcagctttcgcccgcacttgttcgattttctctttaaccagttccggcggttcgccccaggtgaggtagagatcaacctgttctgccgccagctcctgggcgacatctgacgatccgccaaagtaaagtggcggatacggctgttgaatcgccgggaagagcagttttgctccgcgcacatgaatatgtttaccgttgaaatcgacggtttctctctgcaataaacgccgccagacctgggtaaattccgccgaggcttcgtagcgctcgctatgatcaaggaacactccgtcgcctgccagctcttgtggatcgctgcctgtgaccaggttaaacaacgcacgtccatttgagagacggtcaagcgtggcggcctggcgggcggcaacggtaggtgaggttacgctgggacgcagggcgacaagaaacttcagccgctgcgtcaccgggatcatcgatgcggcaaccagccacgcatcttcgcaggagcgccccgttggaattagcacaccggtatagccaagacgatccgccgcttgcgcaatttgttgcagataaccgtgatcaaccgggcgtgaaccttcttccgttcccagataatgcccgtcaccgtgggtcggtaaaaaccagaacatattcagactcataattgttttccttccagttgagtgggctgccagatgcgctggcgaatatcgacttttttcggcaccagacgattttcataaaacagatctgccgtttgctgctgtaaggcggcaacctcggcgttaaccggtttgatggtggtaggagggcgatgatctaagtaagaggcaatcaccggtgccggtaagcccatcgtttttgccagtaaagcgatgctttgctcgcgctggctgcgggttaacgcatcggcctcactaaaggttgccagtacgccctgaataaaagcgccgtttttttctgcatagggacgagctgccagataaaacgatccagtttgattgagatcggtgccgtctttcagcacccgcacgccgccctgtaataatgcagcagagtagtagggatcccagatagcccaggcgtcaacgttaccttgctggaacgcggcgcgggcatcagcgggcgtcaggtaagtgggttggatatcggtaaacttaagtccggcctgacgcagtgcacgcagtaaaaggttgtgtgaactggaacctttctgaaaggcaactttgtgacctttaagatcggctacggttttgatcgggctgttttctgccaccagaatcacttcggctttgggcttcggtggctcgacgcccacgtacaccaaatcagccccggcagcctgggcaaagattggcggaatatccccggtactgccgagatcaatactgccaacgtttaacgcttccaacatttgcggacccgcggggaactccacccaggagatttttgattccggatagcgtttttccagtaactggtggctttttgccagcaccataccaatactgcctttctgatagcctatacgtaacgcttcaggcgaggattctgcagcaaccgcaaaagtagagacgctaagcaatcccgccagcgccagtttaatgatgttacgcatgggcattacctcgcagagacagaaggtcaggaacctgaacatcgcggcggtgcaatgcctgccagaaagtttctagcgcggtatcaagacgggtttgcagatttggcgtgaactggggtctgtgatggtaatcaattacttgtgagtcatcggcaaacacgccgtgcaggatctcctgagctttcagtgcgcttaaaactggtttaagggcataatcgaccgccagcagatgggccacggtaccgcccgtcgccagcggtagcaccactttgccttgcaaagcgcgttctggcagcaggtcgagcagggttttcaacgcaccggaataggcggctttatacacaggcgtggcgacaatcagcccatcggcctgttgcagctgttcggtgaaggtcttgagtgccggactatcgaaacgagcataaagtagatcttccggggcgaagttttgcagattccagtgataaacctctacatccaggccatttagtttttcccgcgcatattccagcaaggagctggagcgagaaggaaagcgaggactacccgccagggtgatgacacgcatactctctccttataaccaattgttctttttttgttaacattgataacaattcggtcagtctgtcggagagacaagaaaattccaaatataaattttgtgtatctttttctgaaaataaactaaagaaagggctttatatatcacgcatatttatttattggatagtcattagatgttgaatcaatgaattactcgttcagttaatatttaaatattcatgaaatctataaattaaagatttgtcacttattggatttagtatgcttgatttaaatggcggacaattattgttattattaagtctaatgtcatttaaaggcattatcatatttacgaagagatcaggatgataacgatgaaaaaaagtgtattgacggcgtttataactgtggtatgtgcaacgtccagcgttatggctgctgatgataatgctatcacggatggctcagtaacatttaatggtaaagttattgctccagcttgtaccctggtagctgcgacgaaagattccgtggtgactttgccagatgttagtgccacgaagttgcaaaccaatggtcaggtttctggcgtgcaaattgatgtgccaattgaattaaaagattgtgatactaccgtaacaaaaaatgcaacgttcacctttaatggcactgcggatactactcagattacagcgtttgctaaccaggcctcatctgatgctgctacaaacgtggccctgcaaatgtatatgaatgatggtacaacggccatcacgccagacacagaaaccgggaacattttgttgcaggatggagatcagacgttgacttttaaagttgattatatcgctacggggaaagcgacttcaggtaatgtgaatgcggtaacaaatttccatattaactattattaatagaactcattaattgttttattaattagtacccctccagtgttctggaggggatattcatattttttaagagtgactatttatgaaaacttgcataacaaagggaattgtgaccgtaagtttaacggcaatattactcagctgctcatccgcatgggcggcaggtaaaggcgggattggacttgcagcaacacgtcttgtttattcagaaggtgaagagcaaatttcactgggtgtacgtaacaccagtccggatgttccttatcttattcagtcatgggtgatgaccccagataataaaaaatcagcagactttattattacaccaccgctatttgtgctgaatccggcaaatgagaatctgttacgcattatgtacattggagcgccgttggcgaaagacagagaaacccttttcttcactagcgtacgggcagtcccttcaacaacgaagcggaaagagggaaataccctgaagattgccacacaaagcgtcatcaaacttttctggcgaccaaaaggtttagcgtatcccttaggcgaggctccggcgaaactgcgttgcacttcgtcagctgacatggttacggtcagtaacccaacaccttatttcattaccctgacagacctgaaaataggtggaaaagtagttaaaaatcaaatgatttccccctttgataaataccaattttctctgccaaagggggccaaaaatagcagcgtaacgtatcgaaccatcaatgactacggggcggaaacgccgcaactcaactgtaaatcgtaagccgtcttcagttaagagagcgagatgtatagaactcatcgacaacacagcctgttaagctctggtggagtgccatcgtttattggtgggctggtggtgtttgtgtcggcagcgttcaatgcacaagctgaaacctggttcgatcctgcttttttcaaagatgatccctcaatggtggccgatttgtctcgtttcgaaaaaggacaaaaaataacgccaggggtttatcgtgtcgatattgttctgaatcagacaattgtagatacgcgcaacgtcaattttgttgagataacgccagagaaggggattgccgcctgtttgacgactgaaagcctggatgcaatgggtgttaatactgatgcgtttccggcttttaaacaactggacaaacaagcgtgtgtgccattggcggagattattccggatgccagcgtaacgtttaatgtgaataaactccgtctggaaatttcagtaccgcaaatcgccatcaaaagtaatgcccgtggttatgtcccccctgaacgttgggatgaagggatcaacgcgctattactgggatattcgtttagcggggctaacagtattcatagcagcgcagacagtgattctggcgacagctattttctgaatttaaacagtggcgttaatttaggcccatggagattgcgcaacaattcaacatggagtcgtagtagtggccaaaccgcagaatggaagaatctcagcagctatttgcaacgggcggttattcctctgaaaggcgaactgaccgtaggtgatgattatactgcaggcgattttttcgatagtgtcagctttcgtggtgtgcagctggcgtcagatgacaacatgctgccagacagcctgaaagggtttgcgcctgtggtgcgtggtatcgccaaaagcaatgcccagataacgattaagcaaaatggttacaccatttaccaaacttatgtatcgcctggtgcttttgaaattagtgatctctattccacgtcgtcgagcggtgatttgttagttgaaatcaaagaagcggacggcagcgtcaatagctacagcgtaccgttctccagtgtgccattactccagcgtcaggggcgaatcaaatacgcggtgacactggcgaaatacagaaccaatagtaatgaacagcaggagagcaaatttgcccaggccacgttgcagtggggcggaccgtggggaacgacctggtatggtggtggacaatatgctgaatattaccgtgccgccatgtttggtctgggatttaacctcggcgatttcggagcaatttcgttcgatgcgacccaggcgaagagtacgctagcagatcaaagcgaacataaaggtcagtcatatcgttttctgtatgccaaaacgctcaaccacttgggcactaactttcaattgatgggctatcgctattcgacgtcgggtttctacaccctttccgacaccatgtataaacatatggatggctacgaatttaatgacggtgatgatgaagatacgccgatgtggtcgcgttattacaatttgttttacaccaaacgtggcaaactgcaggtcaatatctcccagcaattaggcgagtacggttcgttttatttaagtggtagccagcaaacttactggcatacggatcaacaggatcggctattacagtttggctacaacacgcaaattaaagatctttcgctggggatttcctggaactacagtaagtcccgtggtcaacctgatgctgatcaggtgtttgctctaaatttttccctgccgctcaatctgttgctccccagaagtaatgatagctataccaggaaaaaaaattacgcctggatgacctctaacaccagtatcgataacgaagggcacactacacaaaacctgggtttaacggagacattactcgatgacggtaacctgagctacagcgtgcaacagggatataacagcgaggggaaaacggctaatggtagcgccagcatggattacaaaggggcgtttgcggatgcccgagtgggctacaactacagcgataacggcagtcaacaacaactgaactacgctctttcaggcagtttagttgcccattcacagggcattaccctggggcaatcgctgggggaaactaacgttctgattgcagcaccaggcgcagagaatactcgtgtggcgaacagcaccgggctgaaaactgactggcgcggatataccgttgttccttatgccacttcttatcgggaaaatcgaatcgcacttgatgcggcgtcgttaaaacgtaacgtggatcttgaaaatgcagtagtcaacgtggttcccaccaaaggggcgttggttctggcggagttcaatgcccatgcgggtgcaagggtattaatgaaaacatcaaagcagggtataccgctgcgttttggcgcgatagcgacgctggacggcgtacaggctaatagcggcataattgatgatgatggctcgctctatatggcgggtttaccggcgaagggaacaataagcgtgcgctggggcgaagctcccgatcaaatttgtcatatcaattacgagcttaccgaacaacaaattaactctgcgattacgcgaatggatgccatatgcagataatctttggagaaaaatgcgtgtcattactacgactattttttgccgccgtcttaatgttatggtgcgctcaaaccgctgcttatagcgggcagtgtcatactactcaggggaatccgtatattggcgtcaattttggcgttaaaaccctggaggaagaagcaaatacggcaggggtagttaaagacaaattttatcagtggaacgaatcgaatgattattatgtttcctgtgattgcgataaagacaatgtcagaagtggccgatgggcattcgccgcggattcaccgttagtctatttaggcgacaactggtacaaaattaatgactatcttgccgccaaagttttattgcaggttaaaggcagttctcctactgcggttcctttcgaaaacgtgggcacagggggggatacccgatggcatatttgcgaccctggcggtcaacgtttaggtgggcagggggcaagcggtaatagcggtagcttttccctgaaaatattgcagccgttcgttggctcggtcgtcattcctcctatggcgctggcgcgattatatgaatgctacaacatacccgcaggtgattcctgcacgactacaggtacaccggttttagtgtattacctgtctggtacgatcaattcacttggctcatgttccgtcaatgccggagagacaattgaagttgatttaggtgatgtcttcgctgccaatttccgtgttgtagggcataaacctcttggggccagaacggcagaacttgcaattccagtcaggtgtaacacgggaaacgcgggattagttaatgtcaacctgagtctgacggcaaccacagaccccagctatccccaggcgattaagacgtcacgtcctggcgtgggcgtggtggtgaccgatagccagaacaacattatttcccctgctggtggaacattaccgctctctattcctgatgatgcagacagtatcgcgcgaatgaatgtctatccagtcagcacgacaggtgtaccaccagaaaccgggcgatttgaagccacggcaacggtgagaataaattttgattaacgcgtgaacgtatgaagaaaaaaacgatatttcagtgcgttatcttgttctttagcattcttaacatccatgtcgggatggctgggcctgaacaagttagtatgcatatttatgggaatgtggtcgatcagggctgtgatgtcgccaccaaaagtgcattacaaaatattcatattggtgattttaatatcagtgattttcaggccgcgaataccgtaagcactgctgctgatttgaatatcgatatcaccggttgtgccgctggtattactggcgcggacgtcctttttagcggcgaggctgacacccttgcgccgacactgctcaaactaactgacacaggcggaagcggtggtatggcaacgtggattgccgtgcaaattcttgatgcgcaaagtcagcaagaaatcccgctcaatcaggtccagcctcttacgcccttaaaagccggggataacacactcaaatatcaacttcgttataagtccacaaaggcgggagcaacgggcggtaatgcgacggcggttctctattttgatctggtttaccagtgaaggagtgatgttgaaacggataatctggattctgttcttattgggattaacgtggggctgtgagctatttgcccatgatggcacggtcaacattagcggatcgtttcgccgtaatacatgcgtgctggcacaggatagcaagcaaatcaatgtgcagttaggcgatgtctcgctgacacgtttttctcatgggaattatggcccggagaaatctttcatcattaatttgcaggattgcggaacagatgtcagcacggttgacgtcaccttttcaggaacccccgacggagtgcagagcgaaatgttgtccattgaaagtggtacggatgcagccagcgggctggcaattgcgattctggatgatgcgaagatattgattccgcttaaccaggcgagtaaagactacagcctacatagcggtaaggtgccattaactttttatgcgcaattgcgacctgtcaatagcgatgtgcagtcgggtaaagtgaatgccagcgcgacatttgtacttcattatgactaatacgtggaacagattggcgctcttgattttcgccgttttatcgctgctggtggcgggtgaattgcaggcaggagtggtggtcggcggaacgcgatttatctttccggcagacagagaatcgatatctattttactgactaataccagtcaggaatcctggcttattaacagtaaaatcaaccgcccaacgcgttgggccgggggggaagcgtcgacagtgccagcaccattactggccgctccgccacttattctcctgaagcccggtacgacaggcacgttgcgcttgctgagaacggaaagcgacatcttgcctgtggatcgcgaaacgctatttgagttaagcattgccagcgtgccatccggcaaagttgaaaatcagagcgtaaaagtggcgatgcgctcggtatttaaactgttctggcgacccgaaggtttgccgggcgacccgctggaagcttatcaacaattacgctggacacggaattcgcagggtgtacaactcactaacccaacgccttattacattaacctgattcaggtgagtgtaaatggtaaagcgttaagtaatgtgggagttgtgccgcctaaaagccagcgtcagacaagctggtgtcaggcaatcgcaccgtgtcatgtcgcctggcgggcgataaatgattacggcgggttgagtgcaaagaaggagcaaaatctgccctgaaacaggttcggaaaacgtttgcgttttttttgccgcaggtcaattcccttttggtccgaactcgcacataatacgcccccggtttgcacaccgggaatccaggagagttcatgtactaccccttcgttcgtaaagcccttttccagctcgatccagagcgcgctcatgagtttacttttcagcaattacgccgtattacaggaacgccgtttgaagcactggtgcggcagaaagtgcctgcgaaacctgttaactgcatgggcctgacgtttaaaaatccgcttggtctggcagccggtcttgataaagacggggagtgcattgacgcgttaggcgcgatgggatttggatcgatcgagatcggtaccgtcacgccacgtccacagccaggtaatgacaagccgcgtctctttcgtctggtagatgccgaaggtttgatcaaccgtatgggctttaataatcttggcgttgataacctcgtagagaacgtaaaaaaggcccattatgacggcgtcctgggtattaacatcggcaaaaataaagatacgccagtggagcagggcaaagatgactatctgatttgtatggaaaaaatctatgcctatgcgggatatatcgccatcaatatttcatcgccgaataccccaggattacgcacgctgcaatatggtgaagcgctggatgatctcttaaccgcgattaaaaataagcaaaatgatttgcaagcgatgcaccataaatatgtgccgatcgcagtgaagatcgcgccggatctttctgaagaagaattgatccaggttgccgatagtttagttcgccataatattgatggcgttattgcaaccaataccacactcgatcgttctcttgttcagggaatgaaaaattgcgatcaaaccggtggcttaagtggtcgtccgcttcagttaaaaagcaccgaaattattcgccgcttgtcactggaattaaacggtcgcttaccgatcatcggtgttggcggcatcgactcggttatcgctgcgcgtgaaaagattgctgcgggtgcctcactggtgcaaatttattctggttttatttttaaaggtccgccgctgattaaagaaatcgttacccatatctaattatttcttcgaattcctctttataagataatcagggctttattttcagccctggttgttttatattcatcgctgttgcttatttagacattttgtacttttattgttgaggttattaagcgaagcgacaatggattgtgttgctgcggttttatagggtaggggagaggcagatgcgaattaaaccagacgataactggcgttggtattacgatgaagagcacgatcgaatgatgctcgatttagccaatggtatgctatttcgctcacgttttgcgcgcaagatgttgactccagatgccttttctcccgcaggcttttgcgttgacgacgccgcgctctatttctcttttgaagaaaagtgccgcgattttaatttatctaaagaacaaaaagccgaactggtgctgaatgcactggtagcaattcgctatctcaaaccgcaaatgccgaaaagctggcattttgtttcccatggtgaaatgtgggtgcccatgccgggcgatgcggcctgcgtttggttgagcgatactcacgagcaggtcaatttgctggtcgttgaatctggcgaaaatgccgcactatgcctgctggcacaaccctgcgttgttattgcgggtcgcgcgatgcagttgggcgacgccattaaaatcatgaacgacaggctgaaaccgcaggttaatgttgacagcttcagcctcgaacaggcagtctaacgcgccaacttaagtgcagtcttcggtacacagctacagcaaagaatggtgccatcatcgcccattgctgattttttcagcggcgtgacttcgccttctaaaagctgaacacggcaacttccacaaatgcccgcgcggcaagaataagggatacgaattccctgattttctaattgctccagcaacacctgttggttatttccacgaaatgcctgtccctgccagtcaatatctacatttgcgtccggttgttgcgtgatgttggcggtatcatcagcggcagctgcgccgtaaatttttgccggagccgttgccagaatttccacctcatcgccaacgcgaatcacgccgctattacgggcaattaaattctgaccaaaatcgacatcgccgttatcctgggcagtgcggaaagattgcaatgtttttaatggttcgcctgccggatgtttttgccctttttctgggctgacggtggtgaaaatacagcggctacaaggtttaaccacatcaaacaccacatcaccaatgcgaatcactttccagcgatcttcttcccaggctgacgcgccggaaaccaccagattggggcggaattgctccatttttacactggccggacaacgttgttggagatcacgtaacgaggcttcgttagcaagaaggtaaggatagccatcagcaaatgacagaggtacagtgttgtggcgtttcacgcgccgggtcatttgtggccccacccagcgtaattgcacttcgcgggagaaaaatccacttagccatttgttgatcgcgtctggcgcaattcgcgcggtaaaatgtgtgccccaaacttcggttggtgcgtcttgtgtggcgaaatcagcaaaacgaacatatgcgctactgccatctggtgcggtgagatgcaagccatcatgcacaggtgaaggagtaaaccgtaccatctggggaaactggcgagcggtaataaacgtaccgtcaggttccgtgatcataaagatgcgatcgaaggccagaccactgacatctgccagagcatgtgtaagaccaatgccgcgcatcgatttaacaggatgaataaaaagccggattaatgtcgccacggtgcggtcctcaaatgaaaataagccctcaactttatgacatgacgcgcttattagctataatgcgcaacaattttcttagcgcctgtcccattaggctattttatttgtcagtttggccctgggttatgctcgaaatcctcacgtacttgtgtacgctccggtttctccgcgctgtccatgtccagactgactgcaacaattacgcctactgcggtaggctcttagagtaaaagtgacgatatgaattctctgtttgccagtacggcccgtgggctggaagagctgttaaaaactgaactggaaaacctgggggccgttgaatgccaggtggttcagggtggggtccatttcaagggcgacacacggcttgtttaccagagcctgatgtggagccgcctggcctcgcgtattatgttgccgctgggcgagtgtaaggtttacagcgatttagacctctatctcggtgttcaggcgatcaactggacagagatgtttaatcctggcgcgaccttcgctgtccacttcagtggtttgaatgacaccatccgcaacagtcagtacggcgcgatgaaagtgaaagacgcgatcgtcgatgctttcacgcggaaaaatctgccgcgtccaaatgttgatcgcgatgcgccggatatccgcgttaacgtctggctgcataaagaaaccgccagtatcgctcttgatctgagtggtgatggtttacatctgcgtggctatcgcgatcgtgctggtattgcgccgatcaaagaaaccctggcagccgctattgtgatgcgatccggctggcagccaggaacaccgctgctcgatccgatgtgtggttccggtacgttgctgattgaagcagcgatgctggcgaccgatcgcgcaccaggcttgcaccgtgggcgttggggctttagcggctgggcgcagcatgatgaagctatctggcaggaagtgaaagcggaagcgcaaactcgcgcccgtaaaggcctggctgagtatagctctcatttttacggttcggacagcgacgcacgggtgattcaacgtgcacgcactaacgcccgtcttgcggggattggtgaactgatcacctttgaggtgaaagatgtcgcgcaactgaccaatccgctgccgaaagggccgtacggcacagtgttgagcaacccgccatacggggaacgtctggacagcgaaccggcgctgattgcgctgcatagcctgctgggtcggatcatgaaaaaccagtttggtggctggaatctctctttgtttagtgcctcgccggatctgctaagctgcttgcagctgcgtgcagacaaacagtacaaggcgaaaaacggcccgctggactgcgtacagaaaaattaccacgttgccgaaagcactccagacagcaaaccggcgatggtagcggaagactacaccaaccgcctgcgtaagaacctcaaaaaattcgagaagtgggctcgccaggaagggattgaatgttaccgcctgtatgacgccgatctgccagaatataacgttgccgttgaccgttatgccgactgggtggtggtgcaggagtatgcgccgccaaaaactattgatgctcacaaagcgcgtcagcgtctgttcgatattatcgctgcaaccatttcggtactggggattgcgccaaacaaactggtgctgaaaacccgtgaacgccagaagggcaaaaaccaataccagaaactgggcgagaagggcgagtttcttgaagttaccgaatataacgctcacttgtgggtgaacctgacggattatctcgatactggtctgttcctcgatcaccgcatcgcccgtcgtatgctcggtcagatgagcaaaggcaaagatttcctcaacctgttctcttataccggcagcgccaccgtgcatgcgggattaggcggtgcacgcagcaccaccaccgtggatatgtcgcgtacttatctggaatgggcagaacgcaacctgcgtctgaatggcctgaccgggcgtgcgcatcgcctgattcaggccgattgcctggcgtggctgcgtgaggcaaatgaacagttcgatctgatctttatcgatccgccaaccttctctaactcaaaacgaatggaagatgcgtttgatgttcagcgcgatcatctggcgctgatgaaagatttgaaacgtctgctgcgtgcaggtgggacgatcatgttctcgaacaacaaacgtggcttccgtatggatctcgacggcctggcaaaactgggactgaaagcacaagaaattacgcaaaaaacgctctcccaggatttcgcccgtaaccgccagatccacaactgctggctgattaccgcagcctgaaaggaatagtaatgtcattaatcagtatgcatggcgcatggctgtcgttcagcgacgcgccgcttctcgataacgcagaactgcatatcgaagataacgaacgtgtttgtctggtgggccgcaacggcgcaggcaaatcgacgttaatgaaaatcctcaaccgtgaacaagggctggatgacggtcgcattatttacgagcaagatttgattgtagcgcgtctgcaacaggatccgccgcgtaacgttgagggtagcgtttatgatttcgttgccgaaggcattgaagaacaagcggaatatctgaaacgctatcacgatatttcgcgcctggtgatgaacgacccgagcgagaaaaatctcaacgaactggcgaaggttcaggaacagctggatcaccacaacctgtggcagctggaaaaccgcatcaacgaagtgctggcgcaactggggttagatcctaacgttgcgctgtcgtcgctttccggcggctggttgcgtaaagcggcattaggacgcgcgctggtgagtaatccgcgcgtgctgttgcttgatgaaccgacaaaccacctggatattgaaaccatcgactggctggaagggtttttgaaaactttcaacgggacgattattttcatctcccacgaccgttcgtttatccgcaatatggcgacgcgcattgttgatctcgatcgcggcaagctggtgacctatccagggaattacgaccagtacctgctggaaaaagaagaagccctgcgcgtggaagaattacaaaatgccgagttcgatcgcaaactggcgcaggaagaggtgtggatccgccaggggatcaaagcacgccgtacccgtaatgaaggccgcgtacgcgccctgaaagcgatgcgtcgcgaacgtggtgaacgtcgcgaagtgatgggtaccgcaaagatgcaggtggaagaggccagccgctccggtaaaatcgttttcgaaatggaagacgtttgctaccaggttaacggtaagcaactggtgaaagatttttctgcccaggttctacgtggcgacaaaattgccctgattggtccgaatgggtgcggcaaaaccacgctgctaaaactgatgctcggtcagcttcaagcggacagcgggcgtattcacgttggcaccaaactggaagtggcttatttcgatcagcaccgcgcggaactggatcccgataaaacggtgatggataaccttgccgaaggtaagcaagaggtgatggttaacggcaagccacgccacgtattgggctatttgcaggactttctgttccatccgaaacgggcgatgacgccggtacgtgcgctttctggcggtgagcggaaccgcttgctgctggcgcgtttgttcctcaaaccaagcaacttattgattcttgacgaaccgaccaacgatcttgatgtcgaaacgctggaactgctggaagaactgatcgacagctatcagggcacggtattgctggttagccacgatcgtcagtttgtcgataacaccgttacagaatgttggatcttcgaaggcggcggtaaaattggtcgttatgtcggcggttatcatgatgcccgtggtcagcaagagcagtatgtggcgctcaaacagcctgcggtgaaaaaaaccgaagaagccgccgcggcaaaagcagaaactgtaaaacgcagcagtagcaaactaagctataaattgcagcgcgaactggagcagctaccgcaattgctcgaagatctggaggcgaagctggaagccctacagacgcaagtggcggatgcttccttcttcagtcagccgcatgagcagacgcaaaaagtgcttgctgatatggctgctgcagagcaggagctggagcaagcctttgaacgctgggagtatcttgaagcgttaaaaaatggtggctgatcgcaaaatagtcgatttaaacagagacagctgacaacggtaaaattgcctgatgaactgggtttatcaggcatgaaaaccaacactttgttagtcatctgtaaaatagcgcatcattaaggagtaccaatgtgcgaacatcatcatgccgcgaagcacatcctgtgctcgcagtgtgacatgctggtggcgttaccgcgccttgagcatggtcagaaagcggcatgtccccggtgtggcacaacgttaaccgtggcgtgggatgcccctcggcagcgtcccaccgcctatgcgttggctgcactgttcatgctgttgctgtccaacttgtttccttttgtgaatatgaacgttgcaggagttaccagtgaaattacattactggaaattcccggcgtgcttttttctgaggactacgccagcctcggcacctttttcctgttgtttgtgcaactggttcccgcgttttgtctgataaccattctgttactggtgaatcgcgcggaattaccggtccgtttaaaagagcaactggcacgggtgctttttcaactcaaaacctggggaatggcggagattttcctcgcgggtgtgctggtcagtttcgttaaactgatggcttacggcagcattggggtaggcagcagctttctcccctggtgtttattttgtgtcctgcaactgcgcgcttttcagtgcgttgatcgtcgctggttatgggacgacatcgccccgatgccagaactgcgccagccgctaaaaccaggcgtcacggggatacgtcaggggctgcgttcgtgctcctgttgtacggcaatccttcctgctgatgaacccgtgtgcccgcgttgtagtaccaaagggtacgttcggcgtagaaacagcctgcagtggacactcgcgctgcttgtaacgtccatcatgctgtatcttccggctaatattttgcccatcatggtgacggatttattaggctcgaagatgccgtcgacgattctcgctggggtcattctgttatggagcgaaggctcttatcccgtcgctgcggtgatctttctggccagtattatggtgccaacgttaaagatgatcgccatcgcgtggctgtgttgggatgccaaagggcatggcaagcgcgacagtgaaagaatgcatttgatttatgaagttgttgagtttgtaggccgctggtcgatgattgacgttttcgttatcgcggtgctctcggcgctggtgcgtatgggaggtttaatgagtatttatccggcaatgggtgcattaatgtttgctttagtcgtcataatgacaatgttttctgctatgacgtttgacccgcgtttgtcgtgggatcgtcaacctgaatcagagcatgaggagtcctgacagtatggaatctaataatggggaagccaaaatccagaaagtgaagaactggtctcccgtgtggatatttcctatcgtcacggcgctcattggggcctgggttcttttttatcattacagccatcagggaccggaagtgaccctgatcaccgcgaatgcggaaggaattgaaggtggcaaaaccaccattaaaagccgtagcgttgacgtcggcgtggttgaaagcgccacactggctgatgatttgacgcacgttgaaatcaaagcgcggctgaattccggtatggaaaaattgctgcataaagacaccgtcttttgggtggtgaaaccgcagattggtcgcgaagggattagcggcctgggaacgctgctgtctggagtttatatcgaactgcagccaggcgcgaaaggcagcaaaatggataaatacgatttgctggactcgccaccgttggccccgcctgatgcgaaaggtatccgtgtgattctcgatagcaaaaaagccgggcagctctcgccaggagatccggtgctgttccgtggctatcgggtaggttcggttgaaaccagcaccttcgatacacaaaaacgcaatatcagctatcaactgttcatcaatgcaccttatgaccgactggtgaccaacaatgttcgcttctggaaagatagtggcattgcggttgatctgacgtcagcagggatgcgtgtggagatgggctcattgacaacgctgctgagtggcggtgtcagctttgatgtgccggaaggtctggatttagggcagccagtggcaccgaaaacagctttcgttttgtatgatgatcagaagagcattcaggattcgttgtacaccgatcacattgattatctgatgttctttaaagattcggtacgcggtctgcaaccgggagctccggtagagttccggggtattcgcctgggtaccgtaagcaaagtgccattctttgcgccgaatatgcgtcagacatttaacgatgattaccgtattccggtactgattcgtatcgagccagagcggctgaaaatgcagcttggcgaaaatgcggatgttgttgagcaccttggcgaattgttgaaacgtggtttacgcggatcgctgaaaaccggaaacctggtcactggtgcactgtatgttgatctcgatttctatccaaatacgcctgcaataaccggtattcgtgaatttaatggttatcagattatcccgaccgttagcggcggcctggcgcaaatccagcaacgactgatggaagcgttggataagatcaacaaactgccattgaatccgatgattgaacaggcaaccagtacgctttctgaaagtcagcgcacaatgaaaaacctgcaaacgacgctggatagcatgaacaagatcctcgctagccagtcgatgcagcagttgccgacggatatgcagtcaacgttgcgtgaattgaatcgcagcatgcagggcttccagcctggctccgcagcctacaacaagatggtggcggatatgcagcgccttgatcaggtgttgcgagaactgcaaccggtgctgaaaacgctcaatgagaagagtaacgcgctggtatttgaagcgaaggacaaaaaagatccagagccgaagagggcgaaacaatgaaaaagtggctagtgacgattgcagcactgtggctggccggatgcagctccggcgaaattaataaaaactattaccagttacctgtggtgcagagcggtacacaaagtaccgccagccagggcaatcgtctgttatgggtagagcaggtcactgttcctgactatctggcggggaatggtgtggtttatcaaaccagtgatgtgaagtatgtgattgccaacaacaacttgtgggccagcccgttggatcaacagttgcgcaacaccctggttgccaacctgagtacgcaactgcccggctgggtggttgcctcccagcctctgggaagcgcccaggacacgctcaatgttaccgtaacggagtttaacggtcgctatgatggcaaggtcattgtcagtggtgagtggctgttgaaccaccagggacaactgatcaaacgtccgttccgtctggaaggagtgcaaactcaggatggttacgatgagatggttaaagtgctggccggtgtctggagtcaggaagccgcttctattgcacaagagataaagcgtctaccttaattataaagatttgtaaatataaccgtctccggtatgttgcctgaggcggtttttttgtctctaacgtgcggaaaaatttgttcctcttcacattttttgtacaaccgacatgcccgtgtagctcacaaatatgacagtggcgtgaattttgcgcattgacggcagttatgattcgcggtattgcttaactgtgattgcacatttagtaatcactgttttcttttccaccagaaaccagtatgagggaaacgaggcatgaagagacaaaaacgagatcgcctggaacgggcacatcaacgtggttatcaggccggcatcgccggacgctcaaaagaaatgtgtccctatcagacgctgaatcaaaggtcacaatggctgggaggctggcgagaagccatggcggacagggtagtaatggcctgattctgtctctttaaaaagaaacctccgcattgcggaggtttcgccttttgatactctgtctgattataatcagaaggcagacgtatcctggaacagaccgactttcaggtcgctggcggtatagatcagacgaccatcaaccagcacttcgccatccgccaggcccataatcagacgacggttaacaatgcgtttaaagtgaatacggtaggtcacttttttcgctgtcggcagtacctgaccagtgaatttcacttcgccaacgcccagcgcgcggcctttaccttcgccgcccagccagccgaggtagaaccctaccagctgccacattgcgtccaggcccaggcatcccggcataaccggatcgccaataaagtggcatccgaagaaccacagatccggattgatatccagttctgcttcaacataccctttgtcgaagttaccacccgtttcggtcattttgaccacacggtccatcatcagcatgttcggtgctggcaattgcgggcctttagcgccaaacagttcaccgcgaccagaggcaagaaggtcttcttttgtataggattcgcgtttatctaccatgttctctgtaagccttattttattgaagcacgcaggatagctaacacgtgtacgctgaacaagtccgatcagttcggaataaaccagttcagccaacgtaatggccatggaaaacggtgacgtccttcctgttgcgatgcttgcgcgatacgttcctggatggtttgcatcagcgtcgtttggccttcgccatcccacaccagatttaataataacggcagtgcgtcagtcacatcgtctactgcccagatggtgaatttgccttcttctaccgctttcaccagttcactgtgaagacttaaatggcgaacgttagctgtggggataatgacaccttgtttcccggttaactcacgttgctggcaaatagcaaagaagccttcgattttctcatttaaaccaccgaccggctgggcgcgaccgaactgatcgactgaacctgtgatagcgatactctgattcaccggcacatcggcgagggcgcttatcagggcgcagagttcagccatcgaggcactatctccatcaacttcactgtatgactgctcaaatgtcagcgatgctgagaaggggatctgttgctcaagctgtagttccgacatcaggaacgcttgcatgatcatcatccctttcgcatggatattgccgccaagctccgctttgcgttcgatgtcggtgaattcaccatcgccaatatgcacaacgcagctaatgcgagaaggttcgccaaaagcgcgtggatgacccggaaattcaatgaccgaaagggcgttaatttgcccgatgcgttcgccttcggtttcaatcaggatttgctcctgaaggatctcatcctgcatacgttcagcgaggaaaccttcgcgccattcacgctgctgcagcattaagtttagctgctcgccggagaaggtgtcgccatcacacagggaggcgacctctttacactggcggaggatccactgcgggctaagcggaagtgtttcttgttcaccggtgtagcgtgctgcttcgcggataagtatcggccaggcatccgctcccggtgcaggtaagtgattatgtctggcggtaaatgtcacccagcgacaccactgggttactgactccgcatcgacaatctgcagagtatcttcaaattcgctataaatagcctgctctgaaagctctggctccatctcctggaaatcagccaatgattcgcgttcgcctaccagaatgactttcagcttcaatggcatcgaaggcacagagacggggagagggcgcgactcatcaaacgcaacccagtcaaaacgctcgcggttaacgatatttttcagccgcatccacagcagaggttgcgccagcagtgtacgcaaagagataatgagaataccgccatttgcctgatgcaccagaccaggctgcagggtaatgtcgccattaaactggcgcaggcagccaaagagttgctccgcttctacccagtcggcagcgacaacttgcgttaaagtcgcaaaattatcatctgcactcactgcgtgacgtaagcggatggagtggccggaaacctcatagtgaccgcccaccagttggcctgcatcgctttgtagcgtacgcgcggcattggcaataagattcagatactcagactcttccggggccttcgccagcataaaagaggaggatgctcgcgtatgcagcaactgctccagcgcaaattgcagccgcggttgagtatcactgaataaaggatcgttttcgtcaatcaaatgtggctgagcaaatatttcctgatagctatcggtatcaggaaccaggtcacgccatgcaagtttcgtaatggtcaaagttgatgttttttagtctgttgtcaaagccgcgattataccgtaaccggcactacagcacacgtagaaagcaccgacaatactcctggcatgggcgttaaagctcacaggatggagattcttttcttcactggcctaaaaagctgatattctgtaaagagttacacggtaacattgagatcgctatgaaatatcaacaacttgaaaatcttgaaagcggttggaaatggaagtatctggttaagaagcatcgcgaaggggagttaatcacccgttacatagaagccagtgccgcccaggaagccgtcgatgtgttgctctcgctggaaaatgaacccgtgctggtaaatggctggattgacaagcatatgaatccggaactggtcaatcgcatgaagcaaaccattcgggcaagacgaaagcgccattttaatgcggaacaccagcatacgcgcaaaaaatcgatcgatctggaatttattgtctggcaacgtctggctggtcttgcgcagcgtcgcggtaaaacgctttctgaaacgattgttcagctgattgaagatgcggaaaacaaagagaaatacgcgaataaaatgtcttctctgaagcaggatctgcaggcattgctgggtaaggaataactgacgaaagtcagttcaatttactaaaggcaaaaaaaaccccgcagcagcggggtttttctaccagacgagaacttaagcctgcggctgagttacaacgtctttgatacctttaacttcgatctctacgcgacgatccggagccaggcagtcgatcagtgcagcacgctgtttcacgttgtcacaggtgttgccagtaaccgggttggattcgcccataccacgtgcggagatcttgtctgccgggatacctttggagatcaggtaatcaacaacagactgagcacggcgctcggacagaccctggttgtaagcgtcagaaccgatgcggtcggtgtaacccagaacaactacggaaccgtctttcggatccaggttgctcagctggctgtacagctgatccagagcagcctgaccttccggtttcagggttgctttgttgaagttgaacagaacgtcagacttcagagtgaagtgcttggtctgtacttccggtgccggagctggagccggagcaactactggagctgcttcgccctgaccgaaacggtaggaaacacccaggctcagcatgccgttgtccggacgagtgccgatggtgtgtgcgtcaccgatgttgttggtccactggtattccagacgggtagcgatttcaggagtgatcgcgtactcaacaccgccagcgaagaccggagaaacgccggtgtcgtggtttttaccataaacgttggatttagtgtctgcacgccataccatgccacccagacgagtgtagatgtccaggtcgtcagtgattgggtaacccagtttagcggtcagttgaacgccctgagctttgtatgcaccgttttcaacgctgcctttgtacggcatacgacctaaccagtcgtaacccatttcaaagccaacatacgggttaacctggtaaccaccaaaagcaccagcgcccagttggttttcatgggtcgggccattgttgttgatgaaaccagtgtcatggtactgggaccagcccagtttagcaccagtgtaccaggtgttatctttcggagcggcctgcgctacggtagcgaaaccagccagtgccactgcaatcgcgatagctgtctttttcattttttgcgcctcgttatcatccaaaatacgccatgaatatctccaacgagataacacggttaaatccttcaccgggggatctgctcaatattaactctaccgatatcttcggcttatgccgagcacccctggcgatgtaaagtctacaacgtagttgaaaacttacaagtgtgaactccgtcaggcatatgaaaaaaaagtcttgtataaggtatgtttaatcttttttgtcagcgacaatttacagaagagaatcgcggaaaccgcttcagacaagcctccgcaaggaaaattagtcacgactgaaagcattggctgggcgacaaaaaaagttccaggattaatcctaaatttacttaatgatacaaattagagtgaatttttagcccggaaagttgtctcgtggcgtgagaggatgcgcttaccggacgcataataaaccccatagcgttaccttcatttgccgcatcaacaagttcagcatgctcttcttcagtcaaatcatctgccaaccaaccgatcaccacactgtaattgcccgtgcgtaaagcgcgaaccattgactccacagtgtggcaaggggagagctggctaatctgcattactttcgttaagggtagcccagatgcctgaacccattcccgactcagtttttgttgcggtgttaaccagagttgccagcgcgattgctgaccgagttgctgtaacaatggcaacagtagaagttgcgtcatcatgggctgatcttcgcgatagacaacttcactgataagcccggctgtagtgttttccgtagagacacgcgcaattttacttgctgcggatgagaacgacgaagaacgatgtgcatagcctgaagtgtacataatcaatccagcccctgtgagttactgtatggatgtacagtacatccagtgacaacaaagatcaaccctattttcggaaagagcctcgcaaattttgtcgttggtgacgggaaaacataaattaatcttgccccttaagaataagttgcctattttcgtagttaacggatccgttaatgtgaatcattcttttatgttatgattttaaaaggaattttatgaaaagcctctcctataagcggatctataaatcacaagaatacctggcaacgttgggcacaattgaataccgatcattgtttggcagttacagcctgaccgttgacgacacggtgtttgcgatggtttctgatggtgagttgtatcttcgggcttgtgagcaaagtgcacagtactgtgtaaaacatccgcctgtctggctgacatataaaaagtgtggccgatccgttaccctcaattactatcgggttgatgaaagtctatggcgaaatcaactgaagctggtgcgtctgtcgaaatattctctcgatgcagcgctgaaagagaaaagcacgcgcaatacccgggaaagactgaaagatttgcccaatatgtcttttcatctggaagcgattctcggggaggtggggattaaggatgtacgggcgttacgtatacttggggcaaaaatgtgttggttgcgactgcggcagcaaaacagtctggtgacagaaaagattctgtttatgcttgaaggtgccattatcggcattcatgaagctgcgctcccggtggcacgccgccaggagcttgcagaatgggctgactctcttacgccgaaacaggagtttcctgcggaacttgagtaatctggcgttgcagacgaccaatctcaggcagtaatgcaatcaataatccaacttgttgtacgaccagaggttctttgctgtctgcccgtggttcaagttgctgcatccgctgtttcaggctagctaatgcctcattgacgcgttcttcatcagcaggttgatgatgtaacgcgtcatcaacatagcaaactgcgtcatcaagaaacgccagaatttcaggattagttaactgctcccggtgagcaccgagggctgagatatagctggtaaacgtatggttaaggcacagcaaccgaaacgcggcttcgcgaatttgcggggtaacgttcggctcgctggacatatttgataccaccgacgccagctcagcatcacggttgtgtgcatcgcggcgggcaatacgatacgccagacggttatcacgcccctgatggtattgctccagtatggcatcgagataccgacagttggcctctgtggcgcgttcgagcatgcgcggcagattgcgaaactgccagtcaggccagatgtagctcactgccgcccacgcaatggcacaaccaatcagcgtatcgattacgcgaggtaacgctacttcaaaaccttcacccagtaagttaaaacacagtagcaccaaaagtgtgatgaacatcgttgcatgagcgtattgcacgttacggaaggcaaaaaagagcacgccggtaataaccagcagcaccagctgcccttccagtgatggcacaaaccacagcacaggaatgccaatggcgatacctaccagcgtaccaataatccttaacttcaggcggtggcgcgtggcgttatagtttggctggcagacaaacaaacttgtcagcaagatccaatacccgtgatgcattccggttatctgaatgatggcgtagccgaagcacaacaccagcgacattcttaccgcatgacggaagagggcggattccggcgtgaagtgacggctaagacgcagccagatatcactcaacccgtgcgggctgtcatcagcgagctcattttcgtcattattatggggtagtgcctgggcctgttctgattcaattgttgccagttgggcatcaatggcgcgtaaattgttcagcaaaaatcccagtgttttgagtaaatcggcgggtgcgccgttatcgcgcatccgctccagcgcagcatcaatatgcgtaaaagcgcgctcaaaatgcggatcatgttgataaggctgacgcaacaaaatacagcgtgacagttgctggcacgcctggccctgcatcgacatcagccgctgaaaacggaacagcacgtcgctgtggcgaaaatgttcacgcaatgtttgatactgaatatgagaagagctggcacgctcgtgaatatcctgtgcgacaaagtaataatgcagcgtgcgacgcgttccccgttgaccacgatcgccacgtaagcgggtcagcagcgagagtttcgtctgattcaatgtcgccatcagcagaccgttggcgagagccaaatcgtacagcggtgcctggctttgatcttcaatatcaggatcaaacatgcgcgacttgagctcaagataacgcgccagttgttcatagcaacgcgccaggttgtcctgcagcgggcggaccgggaacagcagatgaccaataagtgtcaggacgttgtaccagacggcaccggccagcagatacatcggctgctgataccagtgctcatacagtgatgttcccaacatagtgtaaatggcgatcagcaatgcaccgaaggcaattgttgcatagcgttgacccagaccgccgagcaaaatgaagccgctggtagagagcgttaagccaatcgcaaatagccagggccagggaaacagcaattctactgaggccgaggcgataaaaaagcagaacagcgtaatgatgaggttacgcaaacgtcccgccagtcggtcatcgagatcggtcagcgccgctgccaccatccccagcgttagcggaatcgtcagttttacatcacccagccaccacggaaacgctgtggttccacaaagcgcaataaaaatacgcgcgtaatacagccaggcgctgttccaggtatagcgtttgagcaaaggacttagcataaaggccatattagtggattattcaaaacgacgacgtgcattggcttcacgcgcagcttgcgctgtttctaccgataccacgcgacgaccaaccggccatagtgcaatagcggcaattttaaagttcgcaatgccgacaggaatgccaatgattgaaatacattgtgcgatgcccgttgcaatgtgcatcaggcataaccaccagccaaagaaaatcagccagaaaatattcaataccgtaccgccagtattcagcagcacatttttgccagccgggttcagttcatcgacatgaatagcttcattgccataaggcaccagagacagtttagtgatctcccagcaggatcgtgtcagcggtaaggtaaaaatcagcacaatactgaccagagtcgccaacagccagcccagagtggtggcaaatccgccaagcacaaagttcagaatgttcaaaacggtacgcataaaacctcgctttactgtggttttcagtaatgggcggcaattgtaacgtttttttgggctggagcacgttttctctgacggttacactgataagaaataatttcgtgtggatctacagagtcatggaactgaaagcgacaacgcttggaaaacgtctggcacagcacccttacgatcgggcggtgatcctcaatgccgggattaaagtctccggcgatcgccacgaataccttattcctttcaatcaattactggcgattcactgtaagcgcggtctggtatggggcgagctggaatttgtactgccggacgaaaaagtggtgcgtctgcacggcaccgaatggggcgagacgcagcgtttttaccatcatcttgatgctcactggcggcggtggagtggcgagatgagcgaaattgcgtctggtgttttacgccagcaactggatttgattgccacgcgcactggggaaaataaatggctgacgcgtgagcaaacctctggcgtgcagcaacaaatccgccaggctttgtcggcgttgccgttgccggttaaccgactggaagaattcgataactgccgtgaggcgtggcgtaaatgtcaggcctggttgaaagatattgaaagcgctcggttgcagcataaccaggcgtataccgaagccatgcttaccgagtatgcggattttttccgccaggtcgagtcttcaccgctgaatccggcgcaggcccgggcagtcgttaatggcgagcattctctgttagtgctggcaggtgcaggaagcggaaaaacgtcggtgctggtggcccgtgcaggctggttgctggcgcgtggtgaagcgtcccctgagcaaattttattgctggcgtttggtcgcaaagccgctgaagagatggacgagcggattcgcgaacggctacataccgaagacattaccgcacgcacgtttcatgcgctggcgctgcatattattcagcagggcagcaaaaaagttccgatagtcagcaaactggaaaatgataccgctgcccgtcatgaactctttattgctgagtggcgcaagcaatgcagcgaaaagaaagcgcaggcgaagggctggcggcaatggctgacggaagaaatgcagtggtcagtgccagaaggtaacttctgggatgatgaaaaattacagcgtcgccttgcctctcgcctcgatcgctgggtaagtctgatgcggatgcacggtggtgcacaggcagaaatgattgccagtgcacccgaagagattcgcgatctgttcagtaaacgtatcaagttgatggccccgttattaaaagcctggaaaggtgcgctgaaggcagaaaacgctgtcgatttttcgggccttattcatcaggcgattgtgattctggagaaaggtcgctttatcagcccgtggaagcatattctggttgatgaatttcaggatatctcgccgcagcgggcagcgttgttagcggcattacgcaagcaaaacagtcagacgacgttgttcgctgttggtgatgactggcaggcgatttaccgattcagcggtgcgcaaatgtcgctcaccaccgctttccatgaaaactttggtgaaggcgaacgctgtgatttagacacgacttaccgttttaacagtcgtatcggtgaggtggcaaaccggtttattcagcagaacccaggccagctgaaaaagccgctaaacagcttaaccaatggagacaaaaaagccgtcacgttattggatgagagtcaacttgacgctttgctggataagctctctggttatgccaaaccggaagagcgcattctgatcctggcgcgttaccatcacatgaggcctgccagcctggaaaaagcggcaacacgctggccgaagttgcaaatcgactttatgaccattcatgccagcaaagggcaacaggcggattacgtcatcatcgttggcttgcaggagggaagtgatggttttccggctgcggcgcgggagtcgattatggaagaggcgctactgccaccggttgaggatttcccggacgctgaagaacggcggttaatgtacgtggcgctgacccgggcacgccatcgggtatgggcactgtttaacaaagagaatccctctccctttgtggaaatactgaaaaatctggatgtgccggtggcgagaaaaccgtaagaaacaggtggcgtttgccacctgtgcaatattacttcagacggtccgcgagataacgctgataatcggggatcagaatatcgaccgcgtcgttgaaatgcggcgactggattatgaagtctgccgttgccacgttggtggcgaccggaatgttccataccgtcgccagacgcagcaaggctttcacgtcaggatcgtgcggcacggcatttagtggatcccagaagaaaatcaatacatcaattttcccttctgagatcaatgcgccaacctgctggtcaccccccattgggccactcaacatcgcgttgacgttcatgccggtcgcgcgggaaattaagttaccggtagtgcctgttgcatacagtacgtgttgttccagtaacggttgatgccgttccacccagctcatcagcatttgtttgcagtgatcgtgtgccaccagcgcaatatgtttccgcgcaggtaaagtgcgagtcgtcagttccataatgtacatccgtagttaactttcctacagattactgtaagcacttatcgctgcaagataaagaccgaaaaagcctgcgcacaggcacaaaaatctcaggaagatggttgtttttccgcccactgcaggaaagtatttcgcgtttgtgggtcagccagtttaaaccaatacttcagccgttgttctgtgagcacctgagactgcggtggaatagcatccagctcggaaacacccgaaagcagcgtactgtcatctgccatcatcgtggcaaattgcggtagtgaagcgcgtttcgcggatttgttatagcgttcaacctcgacctcataatcaatcgtttttgccgttgaggtaatggcgagaatatccagctttaccggaatcggcgtcgcatcgccatccaacaattcaaggcgcggcgcggcatcaaaatggttagcttcccgctcattctccaggcgaggcaggcgaaaattgacctggttgatgagctgggtattaaaactgaccaccagcggtggggagatatacagccgttcttcactattggaaagatgaatcgtcttctcaacgcgaaacactaactgatgcggtccattatccagttcaatgctgtccgcaccgcgcagcagagagctggaaaccttcttgccgtcgagtaccagaagatcgacatcggttgaaagccgcagcgtggtggcaaaaacggataccggcaaacataatgcaatcaaggtggtcacgatgccggttttcataggtagctcctgtcaaaagaccgcccgaataataatgtgtcaaaatttttctttaatcatacttactaacatatagacatatttcccgcttttgctctcattcattcgtattagctgcatggttggcatgtcggctttgtcgtacactttgttaaacagtctggaggaaataatgaaagaaaccgatattgcaggcattttaacgtccactcacaccattgcgctggtgggggcaagcgacaaacccgatcgtcccagctatcgcgtgatgaaatatctactcgaccaggggtatcacgtcattccggtttcgccaaaagttgccggcaaaacgctgctgggccagaaggggtatggcacgctggcagacgttccggaaaaagtcgatatggtcgatgttttccgtaattcagaagcggcgtggggcgtggcacaggaagctattgccattggcgcgaaaactctctggatgcaactgggggtgattaatgagcaagcggcagtactggcacgggatgccgggttaaatgtggtgatggatcgctgcccggctattgagatccctcgcctgggcctggccaaataaaaaatccccggaaggcaaaaaccttccggggatttgttcagggattagttacgcagacgcggggcctggagttgtttgcggatggtctgcgccagctcatccatggatggctgttcaggatgttcatcctgcaattcgctacttagctgggcttcagccaggtaggtatgaaccggtaggccgttatcgtcctccatcactacgtgataccacggagcggcgcgaagctcgtcattcaccgccagctcatcaggcgacggttcagagagcgaataaaccgggtcgatatccacgaccactccgagataacctaacagggaatggcggacctgctggccgataccgaatttgctggcaatcatagtcacctcccgggaaatctttacctttgatataagggtaaaattccacatttcaagttacatgacgcgacaggcaaaccctttcagatatagcccttccggataggtagcgatcaccggatgatcggctgcctgacggaactgctctataaattgtacatcacgaccggcatcaattgcggcatccgcgatgattttctgaaataaatcgctggtcatcagaccggaacaggagaaagtcaggagaataccgccttcattcagcagctgaatcgccagcatgttgatgtctttataaccacgacacgcgcccatcaactggcttttattctcaacaaacttcggcgggtccatcacgataacgtcaaatttttcaccgcgatcgcgataagtacgcagcaatttaaagacatcatcacggacaaactcagccttgctcagatccagtttgttcagctcaacgttctgccgtgcaatatccagcgcttcctgggaggtatcaacgctgacaacctggctgcaaccgcccatcagtgccgatacggcgaaaccaccggtataggagaaacagttcagcacacgtttattttcaacgtagcggcgggtagccaggcggctatcacgctggtccaggtagtagcccgttttgtgtccgtgctgaatatccaccagcagtttcattccgtgttcttcaatcggcagcagggcaggtggcaactcgccggtgacggggccctgggtcagctccattccttcttttttacgtaccgcgacgtcgctgcgatcgtaaatcgaacattccgggtacagcgtttgcagggcactaattaatgccgcgcgctgatattctgccccagcactcagcagttgcagcaccagaaaattaccgaaacgatcgatagtaatacccggcaggccatcagattctccggcgattaaacgatagctgtcgaggccatctttttgcgccagccagtcacgccatttttgtgcttgttgcaaacggcgggaaaaaaaagcaatgtcgatagactcagacgggtcaaacgtccagacgcgcgcccggatttgcgaagctggcgaataagcgccgcgtgctaaccattttccctgatgatcaacaatatcgatggtttcaccgaggctggctttaccttccatgcgggcaacggccccggaaaagacccacggatggcgacgaagtaatgatttttcgcgccctttggctaacactaaacgtacactcataatttacttttctgtcgatgcaaagaaatgggcgtcattgtccggagttttccatggatttgcaacgcgtccattaaggataaggagagcagcaatgtcgaaagtctgcataattgcctgggtttacgggcgagttcagggcgtaggatttcgctacaccacacagtacgaagcgaaaagactgggtttaaccgggtacgccaaaaatcttgacgatggcagcgtggaagtggttgcttgcggtgaagaagggcaggtggaaaaattaatgcagtggttaaagagtggcggcccgcgttctgcgcgtgtagaacgggtgctcagcgagccgcatcatccctcgggggaattaaccgattttcgtatccgttaaatacattttaccggttttggcaggccagcaattttggtggcttgcttagccggacctttcggaaacagtcggtataaatagcggctgttacctttttcttcgccaaatttattcgccatcgcttttaccagcatacgaatcgccggagaagtattgaattccagatagaaatcacgcacaaaacgcaccacttcccagtgttccggtgacagcgaaatcccttcgttctctgcaatcaccacagccagcggctcactccactggctgctttctttgagatagccttcggtatccgtttctatctctttaccttcgaagatcagcataattattactaccttaatcagactggcggcagtgtaacaaaaaacaaagccccgcataaagcgaggctatgaaagtgttagcgggtgagattaatcgcggctagcgaagcccagaatgctcagcaggctgacgaagatgttgtacagcgaaacatacaggctaaccgtggcacgaatatagttcgtctcaccgccatgaatgatgttgctggtttcaaacaagatagcgccagaggagatcagaatgaagaccgcgctgatcgccagatgcagagcaggcagctgcaggaagatattcgcaaccataccaatcagcaccaccacaatacccgccatcagcataccgccgaggaacgacatatctttgcgggtggtcagcacatatgcagagcagcagaagaacactaacgccgttccgcccagtgccatagcgattacgtcacccattccggcagacagataggtgttcagaataggtccgaggatataacccagaaaaccggtaaaggcgaatgcggagataatcccggtcggcttattcgccgttttataggtcaggaacatcaaaccatacatacccaccagcgtcagaatcagacccggagatggcagcatcagcaccgtactggcagttgcggtaatcgccgaaaaggccagcgtcaggctcagcagaaaataggtattacgcagcaccttatgggtgctaagcagtgatgtacggtcatgtgaagaactaacaatacgatccattgagtcactctctatgacagatgtaattaattaagcagcataatgataatgcgtaagggcacccagaagttttacccatctttacgcatttgatctggaacaggtttaacagcggattatcaggtcattaagcaaatataacgccctgagaatttcgacaggcaaaagaaaaaggggttagcatttagctaaccccttatcttatttggcggaagcgcagagattcgaactctggaaccctttcgggtcgccggttttcaagaccggtgccttcaaccgctcggccacacttccggaatgacgcgcactataaacatcccgatgcggcgtgtaaacccctaatttgtttgtttgcctgaaaaacagccaaaagtgcattgatagcgtgaaataacagcagattgatcatttcatcaccatgaattccttctcttttactcgtttagcaaccggctaaacatccccaccgcccggccaaaagaaaaataggtccatttttatcgctaaaagataaatccacacagtttgtattgttttgtgcaaaagtttcactacgctttattaacaatactttctggcgacgtgcgccagtgcagaaggatgagctttcgttttcagcatctcacgtgaagcgatggtttgccttgctacagggacgtcgcttgccgaccataagcgcccggtgtcctgccggtgtcgcaaggaggagagacgtgcgatatgaataacgaggaaacattttaccaggccatgcggcgtcagggcgttacccggcgcagctttctcaaatattgtagtctggctgccacgtcgctgggattaggcgcgggaatggcaccaaagattgcctgggcgctggagaacaaaccgcgcattccggtggtatggatccacggtctggaatgcacctgctgtaccgaatcttttatccgctccgctcacccactggcgaaggacgtcatcctttccctgatttccctcgattacgacgatactttgatggctgccgccggaacccaggcggaagaagtctttgaagacatcatcacgcaatacaatggcaaatatatcctcgcagtagaaggtaatccgccgctgggcgagcaggggatgttctgtatcagcagcggtcgaccgtttattgagaaactcaaacgtgccgctgccggagccagcgcgattatcgcctggggaacctgcgcgtcctggggctgcgtgcaggccgcgcgacccaatccgacgcaggcaacgcctatcgacaaagtcatcaccgacaaacccattatcaaagtacctggctgcccgccgatcccggatgtgatgagcgccatcattacttacatggtgacctttgatcgcttgccagatgtcgacagaatgggccgtccgctgatgttctatggtcagcgaatccacgataaatgctatcgccgcgcccacttcgacgccggagagttcgtccagagttgggatgatgacgctgcccgcaaaggttactgcctgtacaaaatgggctgcaaagggcctaccacctataacgcctgttcctccacacgctggaatgatggcgtttctttcccaatccagtctggtcacggctgcctgggctgtgcggaaaatggtttctgggatcgcggttcgttctacagccgcgtggtcgatattccgcaaatgggtactcattccaccgccgataccgtcggtttaaccgcgcttggcgtggtggcagcggctgttggtgtgcacgcagtcgccagcgccgttgaccagcgcagacgtcataaccagcaacctacagaaaccgaacatcagccaggcaatgaggataaacaggcatgagcactcagtacgaaactcagggatacaccatcaataatgccggacgccgcctggtggtcgacccgattacgcgcatcgaaggccacatgcgctgcgaagtgaatattaacgatcagaatgtgatcaccaatgccgtctcctgcggcaccatgtttcgcgggctggagatcatcctacaagggcgcgacccgcgcgatgcgtgggcgttcgttgaacgtatctgcggcgtctgtactggcgtacacgccctggcttcggtttacgccatcgaagatgctatcggtattaaagtgccggacaacgccaatatcatccgcaacattatgctggcaacgctctggtgccacgatcatctggtgcacttctatcagcttgccgggatggactggatcgatgtgttagatgcgctgaaagccgacccgcggaaaacctccgaactggcgcaaagtctctcctcttggccgaaatcatcccctggctatttcttcgacgtacaaaaccgcctgaaaaaatttgttgaaggcgggcagttggggatcttccgcaatggctactgggggcacccgcagtacaaactgccgccagaagctaacctgatgggctttgcccactatctcgaagctctcgatttccagcgtgaaattgtcaaaatccacgcggtctttggcggtaaaaacccgcatccaaactggattgtcggcgggatgccttgcgccatcaacattgacgaaagcggcgcggtcggggcagtcaatatggaacgcctgaacctggtgcagtcaattatcacccgcacggcggacttcattaacaacgtgatgatccccgacgccttagccatcggtcagttcaacaaaccgtggagcgaaatcggcactggtctttctgataaatgcgttctcagctacggcgcattcccggatattgccaacgactttggcgagaaaagtctgctgatgcctggcggcgcggtgattaacggcgacttcaacaatgtgctgccagtggatttggttgatccgcagcaggtgcaggagtttgtcgaccacgcctggtatcgatatcccaacgatcaggtcgggcgtcatccgttcgatggcatcaccgacccgtggtacaaccccggcgatgtcaaaggcagcgataccaacattcagcagctgaatgaacaggaacgctactcgtggatcaaagcgccacgctggcgcggtaacgcgatggaagtggggccgctggcgcgcacgttaatcgcttatcacaaaggcgatgctgcgaccgttgagtcggtcgatcgcatgatgtcggcgttgaacctgccgctttccggtatccagtcaacgttaggccgcattttgtgccgcgcgcacgaagcgcagtgggccgcaggtaagttgcagtatttcttcgacaagctgatgaccaacctgaaaaacggcaatctcgccactgcttccacggaaaaatgggaacctgcaacctggccgacagagtgccgtggtgtcggttttaccgaagcgccgcgcggggcgttaggccactgggccgccattcgcgatggcaagattgatctctaccagtgcgtggtgccgaccacctggaacgccagcccgcgcgatcccaaagggcagattggcgcttatgaagcggcgctgatgaacaccaaaatggcgatccccgagcaaccgctggagatcctgcgtactctgcacagctttgacccgtgcctcgcctgttcaacacacgtgctgggcgacgacggtagcgagctgatctccgtgcaggtgcgttaacagcgaaggagaatcatcatgcaacagaaaagcgacaacgttgtcagccactatgtctttgaagcgccagtgcgcatctggcactggttgacggtgttatgcatggcggtgttgatggtcaccggatactttatcggcaagccgctaccttccgtcagcggcgaggcgacgtatctgttctatatgggctacatcaggttaattcacttcagcgccgggatggtttttaccgtggttttgctgatgcggatctactgggcttttgttggcaatcgatactcccgcgagctgtttatcgtgccggtatggcgtaaaagctggtggcagggcgtgtggtatgaaatccgctggtatctgtttctggcaaaacgtccgagtgccgatataggccataatcccatcgcccaggcggcgatgttcggctatttcctgatgtcggtctttatgatcatcactggttttgcgctgtacagcgaacacagccagtacgctatttttgcgccgttccgttatgtggtggaatttttctactggacgggtggcaactcaatggacattcacagctggcatcggctggggatgtggctgattggcgcgtttgtgatcggtcatgtctacatggcgctgcgtgaagacatcatgtccgacgacacggtgatctccaccatggtcaacggctaccgtagccacaaatttggcaaaataagtaacaaggagcgttcatgagcgagcaacgcgtggtggtcatggggctgggcaacctgctgtgggccgatgaaggcttcggcgtgcgggtggcggaacggctgtatgcccattaccactggcccgagtatgtggagattgtcgatggcggtactcagggactgaacttgctggggtatgtcgaaagcgccagccatctgttgattctcgatgccattgactacgggctggaacctggaacgctgcgaacctatgccggagaacgcattccggcttatctcagcgcgaagaaaatgagcctgcatcagaacagtttctccgaagtgttggcgctggcggatatccgcggacatctgccagcacatattgccctcgtcggtctgcaacccgcaatgctcgacgactacggcggtagcctgagcgaactggcacgggagcaactgcccgctgcggaacaggcggcgctggcgcagcttgctgcgtggggaattgtgccgcaaccggctaatgaatcgcgctgtctcaattatgactgtctgtcgatggaaaattacgaaggcgttcgcttgcgccagtaccggatgacacaggaggagcagggatgagcaacgacacgccatttgatgcgttgtggcaacgaatgctggcgcgcggctggacgccagtcagtgaatcccgtcttgacgactggcttacgcaagcgccagacggcgtggtgttattaagcagtgacccgaaacgcacgccagaggtcagcgataatccggtaatgattggcgaattactgcgcgagtttcccgactatacatggcaggtggcgattgctgaccttgagcagagcgaagccatcggcgatcgctttggcgtctttcgctttcctgccactttagtgtttaccggcggaaactatcgcggcgtgctgaatggtattcacccgtgggcggaactgataaacctgatgcgcgggcttgtcgaaccgcagcaggagcgtgcctcatgagcgaaacttttttccatctgctggggccaggaacgcaaccgaacgatgacagtttcagcatgaatccactgccgatcacctgtcaggtgaatgatgaaccgagtatggcggccctggagcaatgtgctcacagcccgcaggtgattgcgctgttaaacgagttacaacatcaactaagcgaacgccaaccgccgttgggcgaggtgctggcagtcgatctgttaaatctcaacgccgacgatcgtcactttatcaatacgcttctcggggaaggggaagtgtcagtgcgcattcagcaggctgacgacagtgaaagtgaaatacaggaggcgatcttctgcggattatggcgggtgcgcagacgtcgcggcgaaaagttgctggaggacaaactggaggctggctgcgcgccgctggcgttgtggcaggcggcaacgcaaaatctcttgccgacagattcgctgttaccgccgcccattgatggcctgatgaatggcctaccgttggcgcatgagttactggcacatgtacgtaaccccgacgcgcagccgcacagcattaatctgacgcaattacccatcagcgaggctgatcggctttttctctcacgtctctgtgggccgggaaatattcagattcgtaccattggctatggcgagagctatatcaacgccacggggttacgccatgtctggcatttacgctgtacggacaccttaaaaggcccgttactggaaagttatgaaatctgcccaataccggaagtggtgctggcagcgccagaagatttggtcgactctgcgcagcggcttagcgaggtatgtcagtggctggcggaagctgcaccgacgtaaaaagacggtaagtatcgctttcagtcttatgaatatcgcaatcggcgaatacctctggtcgtagagtttcaggataaagagggagatctaccattatcgggttatttttctctcttcgcctacaggagtgcgcatgtgggatgtcattgatttatcgcgctggcagtttgctctgaccgcgctgtatcactttttatttgtaccccttaccctggggctgatttttttgctggctattatggaaaccatttacgtggtcaccggcaaaacaatctaccgcgatatgacgcgcttctggggtaagctcttcggtatcaattttgctcttggcgtggctaccggcctgaccatggagtttcagtttggtactaactggtcattctattccaactatgtgggcgatatttttggcgcaccgctggcgatggaagcattaatggccttcttcctcgaatccacctttgtcgggctgttcttcttcggctggcaacggctgaataaataccagcacctgctggtgacgtggctggtggcgttcggttcaaatctctctgcgttgtggatattgaatgccaacggttggatgcaatacccgaccggtgcgcattttgatatcgacaccctgcgtatggagatgaccagcttcagcgagctggtctttaatccggtcagccaggtgaaatttgtgcacaccgtaatggcgggctacgtgaccggggccatgtttattatggcgatcagcgcctggtatttactgcgcggacgggagcgcaatgtcgcattacgctcgtttgccatcggttccgtcttcggtactctggcgattatcggtaccctgcaactcggagacagttctgcgtatgaagtcgcgcaagtacaaccggtaaaactggcggcgatggaaggggagtggcaaacggaacctgcacctgcaccgttccatgtggttgcctggccggaacaggatcaagagcgtaacgcctttgccctcaaaattcccgcgctgctagggatcctcgccactcactcattagataaacccgtgccgggtctgaagaatttgatggctgaaacctacccacgcttgcaacgcggacgtatggcctggctgttaatgcaggaaatatcgcaaggcaatcgtgagccgcatgtgttgcaggcattccggggactggaaggtgacctgggctacggcatgttgctctcccgctatgcgccggatatgaatcatgtcacagccgcacagtaccaggcggcgatgcgtggcgcgatacctcaggttgcgccggtattctggagtttccgcatcatggtgggctgtggttccctgctgctactggtgatgctgattgcgcttgtccagacgctgcgtggcaaaatcgaccagcatcgctgggtgctgaaaatggcgctctggagtttgccgttgccgtggattgcgattgaagccgggtggtttatgaccgagtttggtcgtcagccgtgggcgatacaggacatcttaccgacatactccgcgcactccgctttaaccacaggacaactggctttctcactgatcatgatcgtagggctttacaccctgttcttaatcgccgaagtctacctgatgcagaaatatgcccgtctggggccgagcgcgatgcagagtgaacaaccgacgcagcaacaggggtaaaggagaaaatcatgtttgattatgaaacattgcgcttcatctggtggctgctgattggcgtgatcctggtggtctttatgatctccgacggatttgacatggggatcggctgtctgctgccgctggtggcgcgtaatgatgatgaacgccggatagtgataaacagcgttggtgcacactgggaaggcaaccaggtctggttgatcctcgctggtggggcattatttgccgcctggcccagagtgtatgcagcggcgttttccggcttttatgtggcgatgatcctggtgctgtgctcactgttcttccgcccgctggcctttgattatcgcggaaaaatcgccgatgcacgctggcgtaaaatgtgggacgccggtctggtcatcggcagtctggtgccgccggtagtcttcggtatcgccttcggcaacttgttgctcggcgtgccgtttgccttcacaccgcaattacgcgtggagtatctcggcagcttctggcaactgctgacgccattccctttattgtgcggattgctcagccttgggatggtgattttgcaaggtggcgtctggttacaactgaaaactgttggtgtgattcatctgcgttcacagctggcgaccaaacgcgctgcactgttggtgatgctgtgctttttgctggcgggttactggctgtgggtcggtattgatggctttgtactgctcgcccaggatgctaacggtccttccaatccgttaatgaaactggtggcagtgctacctggtgcctggatgaataattttgtcgagtcgcccgttttgtggatcttcccgctgctgggattcttctgcccattgcttacggtgatggcgatttatcgtggtcgcccgggttggggatttttgatggcatcattgatgcaatttggcgtgattttcacggcaggcatcacgctgttcccctttgtcatgccgtcaagcgtgagtccgatctccagcctgacgttgtgggacagtacttccagtcagctgacgctgagcattatgttggtaatcgtgctgatatttttgcccattgtgttgctctacactctctggagctactacaaaatgtgggggcgcatgacaacagaaactctccgccgtaacgaaaacgagttgtactaaggagcagaaacaatgtggtatttactttggttcgtcggcattttgttgatgtgttcgctctccacccttgtgttggtatggctggacccgcgtctgaaaagttaacgaacgtaggcctgatgcggcgcattagcatcgcatcaggcaatcaataatgtcagatatgaaaagcggaaacatatcgatgaaagcgatcttaatcccatttttatctcttctgattccgttaaccccgcaatctgcattcgctcagagtgagccggagctgaagctggaaagtgtggtgattgtcagtcgtcatggtgtgcgtgctccaaccaaggccacgcaactgatgcaggatgtcaccccagacgcatggccaacctggccggtaaaactgggttggctgacaccgcgcggtggtgagctaatcgcctatctcggacattaccaacgccagcgtctggtagccgacggattgctggcgaaaaagggctgcccgcagtctggtcaggtcgcgattattgctgatgtcgacgagcgtacccgtaaaacaggcgaagccttcgccgccgggctggcacctgactgtgcaataaccgtacatacccaggcagatacgtccagtcccgatccgttatttaatcctctaaaaactggcgtttgccaactggataacgcgaacgtgactgacgcgatcctcagcagggcaggagggtcaattgctgactttaccgggcatcggcaaacggcgtttcgcgaactggaacgggtgcttaattttccgcaatcaaacttgtgccttaaacgtgagaaacaggacgaaagctgttcattaacgcaggcattaccatcggaactcaaggtgagcgccgacaatgtctcattaaccggtgcggtaagcctcgcatcaatgctgacggagatatttctcctgcaacaagcacagggaatgccggagccggggtggggaaggatcaccgattcacaccagtggaacaccttgctaagtttgcataacgcgcaattttatttgctacaacgcacgccagaggttgcccgcagccgcgccaccccgttattagatttgatcaagacagcgttgacgccccatccaccgcaaaaacaggcgtatggtgtgacattacccacttcagtgctgtttatcgccggacacgatactaatctggcaaatctcggcggcgcactggagctcaactggacgcttcccggtcagccggataacacgccgccaggtggtgaactggtgtttgaacgctggcgtcggctaagcgataacagccagtggattcaggtttcgctggtcttccagactttacagcagatgcgtgataaaacgccgctgtcattaaatacgccgcccggagaggtgaaactgaccctggcaggatgtgaagagcgaaatgcgcagggcatgtgttcgttggcaggttttacgcaaatcgtgaatgaagcacgcataccggcgtgcagtttgtaatgcataaaaaagagcattcagttacctgaatgctctgaggctgatgacaaacgaagaactgtctaatgcgtagaccggaaaaggcgttcacgccgcatccggccactttcagttttactctttctcggagtaactataaccgtaatagttatagccgtaactgtaagcggtgctggcgcgtttaatcacaccattgaggatagcgcctttaatattgacgcctgcctgttccagacgctgcattgacaaactcacctctttggcggtgttcaagccaaaacgcgcaaccagcaggctggtgccaacagaacgccccacgaccgcggcatcactcaccgccagcatcggcggcgtatcgacaatcaccagatcgtaatggtcgttcgcccattccagtaattgacgcatccgatcgcgcatcagcagttcagacgggttaggtggcacctgaccgcgagtaatcacatcaaagcctcctttgccaaaatgctggatcactttgttgagctcatctttacctgccagatattccgacaagccatgttcattactcacggtaaacaggttatgcgaataaccacggcgtaagtcggcatcaataaataacactttttgatcggactgggcgatcaccgctgccagagttgaactgacaaacgttttaccactgtctggcgtcgcaccggtgatcattagaatgttattctccgtctccatcatagcgaaatgcagactggttcgtagcgcacgtacggcttccacagcagaatccgccgggttatccaccgccaggaaggggatatttttagtacgatggcgctgctgattagaaaataaatttttcttacgcagacgggtgcgtttatccagccactcggacattgggatagtggcataaacgctgatgccgtgctcttccagttgttccggggcttctacaccacgacgcaacatcgcacgcgccagcacggcacccacagaaataaacaggccaagaataaaaccaagcaccacgttcaacgcttttttcggtttcactggctgcggctgagtgactgccgggtcgataatccgcacgttaccaatggcactggatttcgaaatactcaactcctgctggcggttaagtaattgcagatataccgcacggcccgcttctacgtcacgacttaaacgcaacacttcctgttgggtggaaggcattgccgatacccgcttattcaggcgtttgcgttcttgctccagcgtctggcgtttttccagcagcgcacgataagttgggtgatctttcttatacagctgggagatctctgcctcgcggaaggtcagctcattgagttgattatcaacgttcacaatctgctcaagaacggctttggcttccaggttaaggtcaaccgaatcgcgctgctggcgataaacgttgagtttttcttccgcttggtccagctcgctgcgcacttcaggtaactggcgctgtaagaattcaaggctttgtgaatcctgcgccgcctggcgagcgatattctgttgcaaatagttgttagcgatgctgttcagaatacgagtaatcaactggggatcatcaccagtcatggtaagttccagcatcccgctttctttactgcgttcgctaacggtaaaggtttcctgcaatgcgttaatcgcttccagttcggtacgctggctcaggacaaactgtgttcctggtttggccttaatgtccgcgatagtcagcgcaacgccatctttttccagacgctggccgaccataccattgacggtgaactcttcaccttccagtgtatagtggccgttttccccaaccgtgagtgtcagttgctgatcctgaccattcagttgtggaatatgcatccagctgatcgccagctcacctggtttttctttggttaatctcgcccagccgcgacccacaatcggaaaatacttctgctcaactatgtcgcgcagattcagttcagcaatggttttaccgagaatcatgcgcgattgcagcagttggatctccggtgcagactcgggcgatgagttagggatcatatcgctcaggccgctgagaatggcgttgccctgtttttgctcaacctggaccagagtatctgcctgataaattggtgtgcttaacagcgagtaagcgacagcgatcagcgtgaataacgcggtcacgctgataataaacttacggtgatcccataactcgccgaccagacgaagcagatcgatctcattttcctgagtgctgcctggtggcgtattcatatttttagttgtcatcgtattttataaactcaaattaccggctgaggcgcttcgcccattcctgactggcgcgctccaacataccgtagacatgttcaaatgcgtcctgacttttacgatagggatccgggatctctttctgttccagccattgcccaaacagcattgtcttcccgcggacctcgggagcaattgcggtaacctgagcaatatgttccgactccattgccagaatcagatcgtaatttcgtgccatctcagcagtgagcttacgtccggcatgtccttcaagagatacgccatgattagcggcaacatctgccgctgtcgcatctgcagggtgttttaccagaccatgaacacctgccgatttgacttttacgcccggcagacgtttacgcagcaagcgctcgccaatgggcgaacggcaaatgttgccggtacaaaccaccaggattgagttaaattttagttgggccatgtttgaatccaccgtgaagtctctgtcaggtcatgcaccccggaaatcgtcggtaccagcagagaaatcacacggttccaacgagccagcggcgcggtagtgacataaacaatgtcgtaaggttcaagctggaattccgttccgagtatcattgccgatgcgtccttcgcattcagctgataaatattggcgattttgccattctgcttgttttgcgttgcacgaataacaaaaatccccgtcgcatcagcgacatcctgattcataccctcagcgttacccagcgcttccgccagggtcataccgctgcggtccattttcagcgtgctctgtttacccacttcacccatcacgaagactttcagatcatcgttgcgcggaataaataaaatatcgcccgggtgcagcagtttgttctggcgcaagtcgccacgctgcatcagcgcatagaggttcactttggtctttacgccattctgggtgagcaccacgttgcgccagtctgcatctgcggtcagaccgcccgcggcgttaatcgcatccatgatggtcagaggaatattggtaatcggctgctgacccgatttgctgacttcgccggtgacgtacgctttttgcgatcggaacgccgcgacgctgacatcgacttgcgggctttcaatgactgaatcgagacgcgctgtaatctcgttgcgtacctgggtaagtgttttcccggccactttcaggcgaccaatataggggtagaaaatcgcaccatcggcgttaacccagttgccggtatcactggcgctacggtattgccctgcgggggtggttagttccgggtgatcccagaccgtaaccatcaacacatcaccaatcccgatacgatattcatagtttgcgatttgctgctccagctccgggttagcctgcgacataatcggtttggcgcgcaactgatcaatcaatcctggcgtgacgggatagatattgaccattttgtccaggtcatactgattgtcaggtagttcaatgacatccttgttactggtcgataaattctgaccaggaacaagggtacatgctgtcaaagacagaacagccaatgtcagtaccgaaaacttaaaaatgttctttttcattggtttatatttatcagtcaatgtaatgttatgaattacgtcaggttattgtccaaccggtacttctcgctctgccgtcattggatagagctggtatttgcgtgacagcatttgtccaccatcacgcgtcaatggtgtccacgaaaccaccgcgcggttgcggttaggtccaatggtcatcaagtcgaatggaatcgagatataaaaacctttactaaagccgccttcgccgtagtcatctttagatacgttactgattgccgcccatacccctaccgccacgccgctgtcaaagcgtttggcgacgtcgatcgttgcgcctttatcttttgccagatattgcccaacgctaagtttcatcagtacgccattgagcgtcggcgggttccagtaagccgtcacgaaacctgttggcgtggaataatcggtgaaacgcatcatgttgtcccagtcacgttgcttcacgtagttaacgtccacacccagcgcccagcaggcatctagcgggcgataaagcagctcggaaccgacaccggcgtacatcgtttccagataaccgccatacacctggccatagaaaccattgcctaagtcagcaaaatagttcgcctgcaagttgttgagataaacgtcattgcgaacgtagtcacggatatgcgtgcgcacgcggggcagggtagagtccgcgggcaacagcgaagacttaaacttgtcgtagttgttgtaaatattggtgaaaataccgccatcaagcagcaggtggtcggtaaaccagtagcgggcactggacatcagccccagctggaacatatagaaatcttccgggccgcccagcgactgtgaaagtgttgggttgaaagagtagctaaagcgatcttcacgaatacggtagccccgaccaaaggcagaaagatcttcagcttcaacacgttgttgttgcagtggctctgattgaccaggcgctgtacctgccagctgtttgcgcaggctggctacgtcggtttcggtagtcaccatcgccatatgctcgcgcttttgcgtcacgctaatcttctcaacgccttgcggcaggttattcaccagaatccggttggcacgatcgaccgcttcacgagagtcacggtatttgtattgctgaccagacatatacagtgtcttatcgcgtagctgaatttctggcgcgtcaaagcccgcgttatacttcagggcggtaagttggtttgctaccgtggtgtactgcaatccttcagattcaggcgcaggttgatatgccggttttggcgtatcgcgcagggcagggcgcagatcgttgaaattggtccgtaacgtgaagccaaacatcaacgtgttaccgcgttcataactcaggttgagatctgcccagctggcagcgcgataaactgcgccgacgttgaaatggcttgcctgaggcagtttgccagcgaaatcattctggtaattgtttccatcgtattcgagtttcagacgcaggggattccacggcgtttgatactcaatgccgccaaagatggaagccgggccacgaaagatatcgctaaagctgatatcgcccgcatcgtgagactctgcgcgatgacaatatttatcgctcacccggcaaaacgggttggtaatattgcccgcattaccggcgtagccccatgccatcccgagggtgaaatcaaatggccccgcttgcttgctggccaccagatactcaccgtcaaacagacccgtaccagcaatatcacgtttaccaaacgccacttgcggtagccagtaaccttcttcccacaggcgaagtttaaaatcgaatgatttgtctttgtatgactgatcgccgctgaaatcttcccactggctatatttgcgtgtgcgcacatccgtataacgaatggtgccttccagccatgggaacagcgccacggaggtggagtagaaccggtattgatcgttatcccggtagttgacgctgaattcaccttccggtgcgatgcgcgcatttggcatctgcaacaatcctgtgccgccaaagtctgattgcgacgaacccagcggatccgggtaggttaatacttcagcatgacaggcactggagacggcaatggccaggcagcttaaaagataagaattcttcttcatcagtcaggaacacgttgcgttaaaacagacacaatctggtcatttaaatcagcatatttttcgggcagtacatgcgcagaaaagcccaaccaaagctggctgccaggcggtggttccacatgtcttttattccacagggcaacaggggcgacgacagtctcaccctcaggcgtaatcaccataacgttattcttgtccgcgcctgcaaggcgggggtgatcttgcagataatcggtaacgctacggcctgcctgccagggcaattgcccggccccagaaaccgcacccagcagagtaatagtcaccggacgctgtacggtatagagcgtatagtccccgaccaacgggggattgctgttctcatccactcgtacaaaatcagggtccagtttgaccggtaagcgaccagtgatattgagattgagtaactgctggcgcacggatttaatcgttgccgccacatcgtcgtcagcttctgcttcccaggaagcaagctgtgccatgacatgttggtagtctttaagcgctttagctttcgccgcagagtcggtcagcaaggcaccaggccaccagaggcgatcgcgcagttgcggttgtgtcaccaactggacaacattttccacggggccaacggaaagtgtctgttgttcgccaggcagataaatagtcaccgttccttgcgcaaaggcatggggtgtcattacgtaaagtacgctggcaatgaaatacgactgtaatttattcatggtgcgggtttaagaaacgtcatttctacgggaataacccctgcgcctaacatttgccgactttgacgaacctggccagtagccgaatcgacccagaatgtgttttgccactgtttttctggccgcgtggaagtcacctcttcctgccagacattacacagcacattgcgacccgcaatattcagcgtctctaatccagcaaaggaaaaagtagaactcagggtcgcagagcgaaaatggttgtcttcactccagagaatatcgcgcgtccagcggctgccatcttttattgccagcgcgttacgcagagggtcctgcccggaatttgtcacttccagcagattattattaagtttgacggtttttaaaagacgtccattgtgggtaaccagcatggcgttatcctgggataaccatttgctttgttcttgttctatatatcccagtaccacaaagattcgttgcccttcattaaggcgtaaatacatagtggaataaggcaacgcctggatctgctgatccgctacggtgatatcctgattatcgaaaaggctggcgcgaaatgtatcgaccatactttgctggctgtgcgtacatcccgcaagaaatagtgcgaaaatcgataaaataagagggcgcacctttaatccttgaaaggttaattaaaaaaatgcaaatctctaaagcccggtacgaatatcgcaaccgggtatcatttaactttaatttcgacgcgttaaagcagtattagcgtgtagtggacgtggtggttgaggtgttatgagaaccgccatcgccactgtcatttgctgcaacaactgccaacgtcgccacaccaacagccgttgccacaccgacaactgtcgccgtgccgacagcgccagcagccacgccaccagtggtagtagcagtcgtggttgcgccggtagtggtcgttgtggtgccagtagtacccgtcgttgcctcggtcccgtttgttgcttcaggggcagcaaacgcagctggcgtcgtcaacatgaaggccataaggattgcagaaagcttgtgtttcataacttttcctttattcatcgcatggacaatacgggtgatgctgccaacttactgatttagtgtatgatggtgtttttgaggttctccagtggcttctgtttctatcagctgtccctcctgttcagctactgacggggtggtgcgtaacggcaaaagcactgccggacatcagcgctatctctgctctcactgccgtaaaacatggcaactgcagttcacttacaccgcttctcaacccggtacgcaccagaaaatcattgatatggccatgaatggcgttggatgccgggcaacagcccgcattatgggcgttggcctcaacacgattttccgccatttaaaaaactcaggccgcagtcggtaacctcgcgcatacagccgggcagtgacgtcatcgtctgcgcggaaatggacgaacagtggggatacgtcggggctaaatcgcgccagcgctggctgttttacgcgtatgacaggctccggaagacggttgttgcgcacgtattcggtgaacgcactatggcgacgctggggcgtcttatgagcctgctgtcaccctttgacgtggtgatatggatgacggatggctggccgctgtatgaatcccgcctgaagggaaagctgcacgtaatcagcaagcgatatacgcagcgaattgagcggtataacctgaatctgaggcagcacctggcacggctgggacggaagtcgctgtcgttctcaaaatcggtggagctgcatgacaaagtcatcgggcattatctgaacataaaacactatcaataagttggagtcattaccgacaatacgtacgcttgagatcaggattgtctactttgagtataacatccttgtgaaatctccctttcctcataccgcttgcactatatactgcgggtaggaaaggcgcgcagagggaaatataagattgttaactatccccctctggaaatacgacttgtgagcataagataaatcttagcaaaatacaaattaaagataaggaaattgttacgaaagctattaattattgttggtaatatagtttcaagtggtactataactggctgttaaatggcatttataactattaggtgcagagatattcgcttaaatggattagtttctttgtggaaaagtaactgatgttataatgtatgatgttgactatttcactattccaataaaaccagtcagctttaaacaagcagcgtcatattaagagagataaacatttgccgctgttggtcctcgcaggccatttacgcggcaaaattccacacgtaatcctggtataagcacttctgcgtcgcggggagtgaatgcggaaatatggacctgaacttctttacgaccgtcggaggggataatgaatcctttgccgcttttgcgatcaaaggttttgacaattcctgtcattttacgggacaaacaaattccttactgaaaatactgcgctgcactatacggggttaataaaataaagccagcgatatttaagaccgccggacggctaaaataaaatttgcttaatctcaattatcatgcgttaatagctgcgtcggtttgaaagacagacagcatacaaagtagtttactaaagcagttctcattatcaggcattatccccttcttttgagtctctctcctgaacactaagtagtttctgtattaaagccctgtttgccgaaaggcccaaaatgaaggaagtaaaatatgtctaataaaatgactggtttagtaaaatggtttaacgcagataaaggttttggctttatcactcctgatgatggcagcaaagacgttttcgtccatttcaccgccatccagagcaatgaattccgcacgctgaacgaaaatcagaaagttgaattttctattgagcaggggcaacgtggccccgcggcagcgaacgttgttacgctctaaggttgccattattactcaacatctccatttccgctgtccatgttgtcatggttcacagtaccgcacatcggcattcgatgtgacggagcgaaaccctttgggcgctaagtgtattttttgtaaatcgacgatgatcacctttgataacgtcgcgctgcaaatacgcactgaccatgcgccgctggatttcacaaaataatatcaggctccctcgtggagccttttttatatctgccttatttttcttcaacgctgtatgtatagtaagcgataacctgttgattattgaatctttcggggagatggcttataacatttcttacctgaccagggtaccgggaaccaacaccttactggcgtgttgctgtcttttaagaccagaagaggttaacagtgaatattgaagagttaaaaaaacaagccgaaacggaaatcgccgactttatcgcgcaaaaaatcgccgagctgaacaagaatacagggaaagaagtctctgaaattcgcttcaccgcacgagaaaaaatgaccgggcttgaaagttatgatgtcaaaatcaaaataatgtgattttgtgaacatcaccccgtgcgaggtgatgttccgcttgttgctaatttagtgaccaatcattggcgcttgtggaattaagcgtcggtacaattcctccggcaccgggctttgccatactcccgcatacattgcgtaaccaatcaccgcaaacataatccccagaaccagtagcgtcattaaccagccagacaacgcaaaggcttttttatttgccgcaggtttttgcagtgaaaaggtcaatgttgaggctaccggacatgactctacgcaagtcatacagccggtacattccactgttcgtacctgaattaatttatcgaccgggatccgtgatgggcaattttttgcgcatttgccacagtcgatacaactttcggcattgcgacgaatcttaaacggcgacaatagcgaaaccacgcccatcagcgcgccatatgggcaaagataacgacaccaggcatggcgaataaacaggctggcaatcagcaaaacggtcacgctgattaatgtcgcggtccccatatgacgaaagaaatcgagcattttaacgtccatcaccacgctgtagggcgacaacataaaatagtgaatcgcctgagcgggcatcaataacgcgatatagataaaaaaactcaacagcaaatacttcacgccgcgcagaggaatatccagccagcggggaaggacacattgccgaccaaacagtttgttaccgagatcgccgattaattcagaaagcgtaccaaccgggcataaccatgagcaaaaggcctttttgagtaatagactgatgacgataaaagcgaccaataacagcatcgcggcggcgtggacggacggtaactgacctgttacaaggctatatttcagattcatcagcccggcaatcggtagccagccttcgatacctcccggtctggcgacaaatgtcgtgctacttgccgtttcgtaatagcgcacccaataccagaacgtgatggcaatataaatattcattgccaacagtaataattgcgtcgctttacgccaggtcgtggcattacgccagtcattccacggtaatttgccgcccgtcgtgcctggccgccgctgccagcgggttcttttattctctgccatgattttgccagtccgttaagttgtataccaaatgccactattctagttgttcttaactggctgatattgattcaaatcgcgttcaggtctttcttatgcaaccatgcttccagagcggcaacactgcgtgtaatttcttcgtgtggaaggggggcagataatggctgctgctccagttgtgcgcatagctggctggcgatatgcattcccagactcgagcaactgctttttagctgatgcgcggcacgctttattttctcgctatcctgactggcgcgggcaatgtcgatttcatcgagaagcggcagggcatgttgtgtaaataataccagccattcgtggatcttctccgtccccattaactgagcatcttcattgagttgcgatacatccagcgattgatcattattgacttgcagttggagatagtgcgccagtaactgaccgagcacttcacgcggcaccggtttagggataatcccgcggaataatgaactggtacgctggcgcagcgtttcgtcaatgacatgggcgctaaagccaatcaaaaccagcgacggatattgctgtgccagttgtcgggcaagcgtaatgccgtcgatatccggcagatcaaaatccaccagtgcggcagcaaacggttcgctattttgcagtgtctctaaagcctgcgcggcattgccaacagcaacaatctgcgcaccactggttttcagcatctcaatggtaattcgctgggttagcgggttatcttcaattaacagcaaacgtaaaccgtcaagacgcaccgcctgattgactgtttttggcacgggtgccgtggcaacacgtaacggcaagcgtaaacaaaaacagcttccaacctccggcgtgctggtggcgctcagttcgccgcccatcgcctgggccagacggctactgatagtcagtcccagcccggtgccgccgcgtttgccgcttacctgcacaaatggctggaagatttctgccagtttcgcgggatcaataccgcagccgctgtcttccacttcgaccagccattgctcgccatcagtgcgactacgcaggataatgtacccttcgtcagtaaaacgcagggcgttgctcaacaggttggttataacctgacgaatacgtcgtggatcgcccattaacgcgcacggcatatcatcggcaattgccgttgccaggcgaatcgggcgacctttcacccgtccgctcattaattgcagggtactttccagcagcgggcgcggttcaaagggctcatcgctgaccgaaacattcttgccacctgcttcgatagcggaataatcgagaatatcgttgaggatggtcagcaacgattcaccagagtcagtaattgcccgcaaatcatcacgctgggcgttaagtgcggggttatctgccagcagttgagcagtgccgagaataccgtacagcggtgtgcggatctcatggctcatcgccgccagaaacgccgattttgcctggctggctttttctgcttccgcccgtgcctgtcggtgttctatcaccagttcctgcaattcagctgtacgcgctttgacctgcgccgccagctgttcgcggtggcgattcagtgcatgaacattgctgcgaaacgcatccatcagccgcccgatggtatccagctcccgtacgccagcggtttccgggaaaggggagtcaatatcaccgtccagcagccgttgcagcgcctgcgtttgttcggcaagtggacgcgtgactgagcgataaaccacgcgccagaggatcagaatcagtgcgcaaagtgaaaccatccccagcaataacaggctgtattgcccgcgtgcactcgctttttccagatgcgccagtccgtgctgattacgcagctcaatggtgtcgaccagctgactgacttcgctactaaactgcgcgaactgggcgatgttattttgtgcgagagtttgtaggtgattgctgatttcactgtcctgctgatacagcgccagcaaatcgctatattggctaacggtagttaacgttgttgcgacctgcgcacgaacacccggatcttcaatgcgtatttgccgacgttgcagaattttcaccgcattattgagctgcttttccagcgttggtgcatttttctggatctgctccagccccagattcatcaccatttgctgcacccgcagagcgctaaggcgcagttcattcatctggttaacatactcaagatcgatatcaatcagccgatcgagtgcactttcagcagcctgacgctgatcttgttcgatcaaatcgtaaatcccggcctgggtcgctccagcggaagttgtcgcattattcgcctgaccttgcgccaggcgtgcgatctcatcggcggcagcgactatctgctgactgagttgctgttgttgctggcgcagttgcaaacgctgccccaccagttccccttgctgacgtaacgaacgggagatctcctgctcctgttgttcaatagcggtggtatcaaaaccttgttcccgtaacgcttgcagcaacgcattaatcttcaggctttgtgcggtgagcattcgcccctgcgcctgccacatcttttcgttatcggcactggtcaggttctgcgcggcgaaaagttcccaggcgctggcttcgctcaactggcgcgccatattcatggtaggaatcaatgcctgagtgttgtctttttccacctggctgataaagcgcaggttgtaccatcccaccagggtactggtcagggttaacagcgccatcagggcaaagcccatccagagtcttcgggtcagggttaaattcacggtcggtgcactttaggtgaaaaaggttgagtcgcaaagcggaatgcatctagcataaagccttattattgatgaggctatcatgcgcgtactgctatttttacttctttcccttttcatgttgccggcattttcggctgataacctgttgcgctggcatgatgcgcagcatttcacggtgcaagcctctacgccgcttaaagccaaacgcgcatggaaactgtgcgcgctttatcccagcctgaaagattcatattggttatcgttgaactatggtatgcaggaggctgctcgccgctacggtgtggatttaaaagtgctggaggcaggcggctacagccagttggctacccagcaagcacaaatcgaccagtgtaaacagtggggcgcagaggccattttgctcggtagtagcacgacctcatttcccgacctgcaaaagcaggtagcaagtctgccggtgatcgaactggtaaatgctattgatgctccccaggtgaaaagccgcgttggtgtgccctggtttcagatgggctatcaaccggggcgatatctggtgcaatgggcgcacggtaaaccactgaatgtgctgttgatgcccggacccgataacgccgggggcagtaaggagatggtcgagggttttcgcgcagccattgccggaagcccggtgcgtattgttgatattgcgcttggtgataacgatattgaaatccagcgtaacctgttgcaggagatgctggaacgccatccagaaatcgacgtcgttgccggaacggccattgcggcagaggcggcaatgggggaagggcgtaacctgaaaacgccgcttaccgtggtgtcgttttatctttcacatcaggtgtatcgcgggctgaagcggggaagagtgattatggctgccagcgatcaaatggtctggcagggggaactggcggttgagcaggccatcaggcaattacaggggcaatcggtttctgataatgtcagcccaccgattttagttctgacgccgaaaaatgccgaccgtgaacatattcgccgctcgctgtcaccagggggatttcgtccggtctatttttatcagcacacatcagcggctaagaaataaccttcaccatgttgcgtcaccagtaaatccgcgctgagtttatgacgtaaacgacgaattaacacatcgacggtgcgcaggtcagggttttccacccgacgcgcagaaagcatacgtagcagacgttcacggctgagaatttcgcccggattcgtcacaaatgccaccaacatttcatactctgcgcgggtcagtttaatcggctcgccatcccgctccagcgtatggcgcgacacattcaggcaataaccggcaaagcgatagcagttgtcctgagtgtgcggttgagcttgtcgcgcgaggtcgattcgccagagcagatttttcacccgtactaccagttcgcgcagttccagcggtttggtgacgtaatcgtctgcgcccatttccagcccaacaatacggtcaatccgatcgctgcgtccggtaaccagaataatccccaccgttgagcgttctcgcagggcgcgggttaacatcaggccattttcatcgggtaagttgatatccagcagaattaaatctaccgactgattctgcataatttcccgtagcccagcaccgctcgccgtaacggaaacggtatacccctcctgagtgaagtaggattgtaatcgcgcctgggtaaccggctcatcttcaacaataacaatgtgatgtggcatcagagggttttactcattctgttcatatctgttcatattctgccgtaagccgttcatcctgaccagtgccgctgttcatatttgctcattaagatcgcttcactaaaccataattctacaggggttattatgcggaaactctggaacgcgctacgccgacccagtgctcgttggtcggtactggcgctggtcgcaattgggattgtgattggcattgcgctgattgtattgccacacgttgggatcaaagtcaccagcacaaccgaattttgtgtcagttgccacagtatgcaaccggtgtatgaagaatataaacagtcggtgcatttccagaacgcctccggcgtgcgagctgaatgccatgactgtcatatcccgccggatattccaggcatggtgaagcgcaaactggaagcgagcaatgatatctaccagacctttattgctcactccattgatacacctgaaaaattcgaagccaaacgcgcggaacttgccgagcgtgaatgggcgcgaatgaaagaaaacaactcggcaacctgccgctcctgccataactacgatgcgatggatcatgcgaagcagcatcctgaagcagcacgtcagatgaaggtggcagcgaaagataatcaatcctgcatcgactgtcataaaggtattgcccaccagttaccggatatgagtagcggcttccgtaagcagttcgatgagctgcgcgccagtgctaatgacagtggtgacacgctgtactctattgatattaagccaatttatgcggcgaaaggcgataaagaagcctctggttctctgctgcctgcttcggaagtgaaagtccttaaacgtgacggcgactggctgcaaattgaaattaccggctggacggaaagcgccggacgtcagcgtgtactcacccaattcccaggtaaacgcatctttgttgcctcgattcgtggtgatgtgcagcagcaggtaaaaacgctggagaaaaccaccgttgccgacaccaataccgagtggagcaagttgcaggccactgcgtggatgaagaaaggcgacatggtgaacgatatcaaaccgatctgggcttatgcggattcgttgtacaacggcacctgtaaccagtgccacggcgcaccggaaatcgcccactttgacgctaacggttggatcggcacgctcaacggcatgattggctttaccagtctcgataaacgtgaagaacgcaccttgttgaaatatctgcaaatgaatgcgtctgacaccgcaggtaaggctcacggcgataagaaggaagaaaaataatgaacaataacgatctctttcaggcatcacgtcggcgttttctggcacaactcggcggcttaaccgtcgccgggatgctggggccgtcattgttaacgccgcgacgtgcgactgcggcgcaagcggcgactgacgctgtcatctcgaaagagggcattcttaccgggtcgcactggggggctatccgcgcgacggtgaaggatggtcgctttgtggcggcaaaaccgttcgaactggataaatatccgtcgaaaatgattgccggattgccggatcacgtacacaacgcggcgcgtattcgttatccgatggtacgcgtggactggctgcgtaagcgccatctcagcgatacctcccagcgcggtgataaccgttttgtgcgcgtgagctgggatgaagccctcgacatgttctatgaagaactggaacgcgtgcagaaaactcacgggccgagtgccttgctgaccgccagtggttggcaatcgacggggatgttccataacgcttcggggatgctggcgaaagctattgccttgcatggtaatagcgttggtacgggcggagattactctaccggtgctgcgcaggtgatcctgccgcgcgtagtcggttcgatggaagtgtatgaacagcaaacctcctggccgctggtattgcagaacagcaaaaccattgtgctgtggggctccgatttgctgaaaaaccagcaagcgaactggtggtgcccggatcacgatgtttatgaatattacgcgcagctaaaagcgaaagtcgccgccggtgaaattgaggtcatcagcatcgatccggttgtcacatccacccatgagtatctggggcgcgagcatgtgaagcacattgcggttaacccgcaaactgacgtgccgctgcaactggcgctggcacatacgctgtacagtgaaaacctgtacgacaaaaacttccttgctaactactgtgtgggttttgagcagttcctgccgtatctgctgggtgagaaagacggtcagccgaaagatgccgcatgggctgaaaaactgaccggcattgatgccgaaaccattcgtgggctggcgcggcagatggcggcgaacagaacgcaaattattgctggctggtgcgtgcagcgtatgcagcacggtgaacagtgggcgtggatgattgtggttctggcggcgatgctggggcaaattggcctgccaggtggtggttttggttttggctggcactacaacggcgcaggcacgccggggcgtaaaggcgttattctgagtggtttctccggctctacgtcgattccgcctgttcacgacaacagtgactacaaaggctacagcagcactattccgattgcccgttttatcgatgcgatcctcgaaccggggaaagtgatcaactggaacggtaaatcggtaaaactgccgccgctgaaaatgtgtatttttgccggaactaacccattccatcgccatcagcagatcaaccgcattattgaaggcttgcgcaagctggaaacggttatcgccatagataaccagtggacctcaacctgccgctttgccgatatcgtactgcctgcgaccacgcagtttgagcgtaacgatctcgaccagtacggcaatcactccaaccgtggcattatcgccatgaaacaggtggtgccgccgcagttcgaggcgcgcaacgacttcgatattttccgcgagctgtgccgtcgctttaatcgcgaagaagcctttaccgaagggctggacgaaatgggctggctgaaacgcatctggcaggaaggtgtacagcaaggcaaaggacgcggcgttcatctgccagcgtttgatgacttctggaataacaaagagtacgtcgagtttgaccatccgcagatgtttgttcgccaccaggcattccgcgaagatccggatctcgaaccgctgggcacgccgagtggcctgattgagatctactcgaaaactatcgccgatatgaactacgacgattgtcaggggcatccgatgtggtttgagaaaatcgaacgctcccacggtgggcctggctcgcaaaagtatccgttgcatctgcaatctgtgcatccggatttccgacttcactcgcagttatgtgagtcggaaacgctgcgtcagcaatatacggtagcgggtaaagagccagtattcattaacccgcaggatgccagcgcgcgcggtattcgtaacggtgatgtggtacgcgtctttaacgctcgcggtcaggtgttggcaggggcagtggtttctgaccgctatgcacccggcgtggcacgaattcacgaaggggcatggtacgatccagataaaggcggcgagcctggtgcgctgtgcaaatacggtaaccccaacgtgttgaccatcgacatcggtacatcgcagctggcgcaggcgaccagtgcgcacactacgctggtggaaattgagaagtacaacggaacagtggagcaggtgacggcgtttaacggccccgtggagatggtggcgcagtgcgaatatgttcccgcgtcgcaggtgaaatcatgaccacgctgacagcacaacagattgcctgtgtttacgcctggctagcgcagttgttctcccgtgagctggacgatgaacaactgacgcaaatcgccagtgcgcagatggctgaatggttttcgttgctgaaaaacgaaccgccgctcactgcggcggtgaacgagctggaaaaccgtattgccacgctgacagtacgtgacgatgcccgtctggaactggccgcggacttttgcggcctgtttctgatgaccgacaaacaagcggcgctgccgtatgcatcggcctacaaacaggacgagcaagagattaaacgcttgttagttgaggcagggatggaaaccagcggcaatttcaacgaaccggcagatcatctggcgatctatctcgaattgctcagccatctgcatttttcgctgggagaggggaccgttcctgcgcgaagaatcgacagtttgcggcaaaaaacactgacggcgctgtggcaatggttaccagagtttgttgcgcgttgtcgtcagtatgacagctttggtttttacgcggcactaagccagttattgctggtgttagtggagtgcgaccaccaaaacagataacgtcgtttgtgcgcctgaaaagacgcgtttagcgtcgcatcaggcattatggcgcagttgccggatgcggcgtgaacgtcttatccggcccacaggaactgtaatctttgtagaccggttaagatgcgtcatcgcatccggcaaacacacatcacggatgagctacaaaccgggaaagccgctggcgcagcaggcggttttcctgcttcaggtgcgcaatatcatccattaacgtcagcgccaccgcgatccccggccagtccagagccagttcatgacgcaggcgtaccgcgcgttgcaccacaatggcggcatggtcgtcaaatacccaggttgtttcctggatctcacgcggttcaaccacccccaaaccgacaatttcattcaactcctcttcagagatgccggtatgcaggcaaaattcggtaatagtaaaagtcaccgtaacattagccattatgctttcccccaatctttacgtggatcaaaagacgactgggcgtctgccagttgctgccacagcgcggcagtgttttcatccggtttcggcggcatcacgattttcagtaccgcatacagatcgccggtctgttttttgctcaccagacctttgcctttaacgcgcaatcgttgcccggcctggctgcctggcgggatagtcagcaaaatgctttctttcagtgttggaacggtgactttagcacccagcgccgcttcccacgggctaaccggcaccacaatttccagatcctggccgacaatatcaaacagcggatgtggcgcaatatgaatcaccagccacaaatcgccatttggaccgccgttttcgcccggcgtcccctggcctttcagacggatgcgttgaccattgccgacgcccgccgggatcttcacattcagcgttttcggaatttcctgttcgatcatgccaaaggcgttataaaccggcaggttatagctgatggtacgcttatgctcagtaagcgtttcttcgaggaataccgccacttcgatttcaatatcgtggccgcgtgtggcggggcgttgacggctctggcgggcatgctgaccgaaaattgacgagaagatatcgtcaaaatcttcggcgttaaaactctgaccgtcgccatggtggaactgacggttaaattgcggatcgttgcgatgttgccacatctgatcatactcagcgcgacgttgttcatcacttaacacttcccaggcttcagcgacctctttgaagcgggcttcggcatccggttctttgctgacatcaggatggtatttgcgggcaagtcgacgataggcggtcttgattgtcttgagatcgtccgtcggtttcacgcccatgatggcgtaataatcctttaattccatagcgttatctcgcgtaaatcaacacaaattgaaggaacccctgtaaggtaactcctataagtgtagggtaatcctcaaaatttcatatgccaacacagaatatgttattgaaatcatcgcggagaggaggtcgccatcaagatgggttgctgaacatattttaaacaggtgaaaaagggtgagcgatttttgatagttgaaccaggcactttaagtttaactagggcgtcattatttattaaattttatagacgctatatatgggtagtaatatacatggaattagttgcactgcaaataattatttgaaacaggcctggaacgatataaaaaatgagtacgaaaaaaatcaaacatattcaatcacgctttttgaaaacacactggtgtgttttatgcggttatacaatgaactcagacgtaaagtaaatgaagaggatactccatgtctggaatgtgaatcactagaaaaagaatttgaggaaatgcagaatgataatgatctatcattatttatgagaatattgcgtactaatgatacacaaatttattcaggggtttcaggaggtattacatatactatacaatatgttcgagatattgatattgttagagtgtccttgccgggcagagcttcagagtctatcacagattttaaaggttattattggtataactttatggagtatattgaaaacattaatgcgtgtgatgatgttttttctgagtattgttttgatgatgaaaatataagtgtccagccagagcggataaatacgccgggaatatctgatttggattctgacattgatttgtctggtatatcttttattcagcgtgaaactaaccaggcattaggattaaaatatgctcctgtagatggcgatggatattgtctgttaagagctatactggttttaaaacaacatgattattcatgggcgctggtcagttataagatgcaaaaggaagtttacaacgaattcattaaaatggttgataaaaaaacgatcgaggctcttgttgatacggcattctataatctcagggaagatgtaaagacgttatttggcgttgatctacaatctgacaaccaaattcaggggcagagtagtcttatgtcatggagctttctgttttttaaaaaacaattcattgatagttgcttgaataacgaaaaatgtatcctgcatttacccgagtttatatttaatgataacaagaacttgcttgctttagataccgacacgtcggataggattaaagcggtgaagaattttcttgttgttctttcagatagcatttgctcattatttattgttaatagtaatgtggcatcaatctccttggggaatgaatccttttcaacagatgaagatcttgagtatggttatttaatgaacactggcaatcattatgacgtttacctccctcctgaactttttgctcaggcttacaagttaaacaataaggaaatgaatgcgcaactcgactatttaaatcgttatgcaatttaatggcaaaggcatatgctaaaaaccattgttattagtctcacacttttttattggtaaatattgtctctgtattggtaacgccgcagatattctgtttagccacaggtgcaattatcagcggcgtacgcgaggcaggggctaatcaggcatagtttgcgtcaaaccttgcctgtttttgaagatgtatatagaaaaacaggcgttcaacaagccattttgcgaacctgttcccggaaaaaagtcatatttctgtcacactctttagtgattgataacaaaagaggtgccaggaatgaacaaaacgctaatcgccgcagctgtggcagggatagttttactcgcttcaaacgctcaggcacaaaccgtaccggaaggctatcagctacagcaagtgctcatgatgagccgccataacttacgtgcgccgctggcgaacaatggcagtgtgctggagcagtcgacgccgaataaatggccagaatgggacgtccccggtgggcaactcaccaccaaaggtggcgtgctcgaagtgtatatgggccattacatgcgtgaatggctggcagagcaggggatggtgaaatcgggggaatgcccgccgccgtacaccgtttatgcctatgccaatagtctgcaacgtaccgttgcgaccgcacagttctttattaccggcgcattcccggggtgtgatattcctgtgcatcaccaggaaaaaatgggcactatggacccaacctttaacccggtgatcaccgatgattccgccgcattcagtgaacaggcggtggcggcaatggagaaagagctcagcaaactccagcttaccgacagctaccagctactggaaaaaatcgttaactataaagattcccctgcctgtaaagagaaacaacagtgttcgctggtggatggcaaaaatacctttagcgccaagtatcaacaagaaccaggtgtttccgggccgctgaaagtcggcaactcgctggtagatgcgtttactttgcaatattacgaaggttttccgatggatcaggtggcctggggagaaatcaaatctgaccagcagtggaaggtgttgtcgaagcttaaaaacggctaccaggacagcctgtttacctcaccggaagtggcgcgcaatgttgcgaaaccgctggtcagttatatcgacaaagctctggtcaccgatcgcaccagcgcaccgaaaattacagtgttggttgggcacgactccaacattgcctctctgttaacggcgctggatttcaaaccgtatcagttgcatgaccagaacgaacgcacgccgattggcggcaaaatcgttttccagcgttggcatgacagcaaagccaatcgcgatttgatgaaaattgaatatgtgtatcagagtgcggaacagttacgtaatgccgatgcgttaaccctgcaggcacctgcgcagcgtgtgacgctggaattaagcggttgcccgatagacgctgatggtttctgcccgatggataagtttgatagcgtgttgaatgaagcggtgaaataacagaaaactcccccgcgagaagcgggggagtcgctggttaaacgtttttacgttcgatggtctgttcgccccaaaaaagcgaatctttatcggtcttagcaaaggctttgactaacacttcatcactaccttcttcccaaatcttttccgccattttttcgtcgtacccggcgacttcgaaaatggcctcggctatttccggcgacgtattgcgcagagatgcccattcaccgacgtgatgagctttcgcttcttgagttggcatgcgtatcctcctgttgaagattagccgttaagtttaactgccagacctgcgacatattccccttgataacgagcaatagacagttcttcctggctgggctggcgtgaaccgtcaccgcctgcgatggtggttgcgccgtacggcgtaccgccgcgaacctgtgaaacgtcaaataattcctgcgctgcgtagccaatagggacaattaccatgccgtgatgcgcaagggtcgtccaggtggatgtgatggtttgttcctgaccgccgccagtaccggtggaactaaagacgctcgccagttttccgtatagtgcgccggaagcccacaggccgcccgtctggtcgaggaaggtacgcatttgaccggacatgttgccaaagcgggtaggtgtaccaaaaataatggcgtcgtaatcggccagttcttgcggggttgcaaccggtgcagtttgcgttttaccgcctgctttttcaaataattgcggcggcatggtttccggtacacgcttaacgacaacttcagcgccatccactttgcttgcaccctcagcgactgcgcgtgccatcgtttcaatatgtccgtacatggaataataaagcaccagaactttagccatttctaaccactcctcgtgttatctctattccgtagcgattcgctaccacttatttaaagataagacgtccttttcagagtgcaaatttcacaaccacttatttgatttataacaactttcacaagcacgtaattttgtcgcaaaatgacacatttttatctcatcgcgtttttttaatcataagagcggcttatggataattattggagatgatatctattctcgctaagaagctgttgcaggatattaccaaacgcgggtctgcccgcgtcagttcactaagcttagtcccacgtagcgaaaatatggcagccgccatacgccgcgttaattctatgcaatatgatgtctatacccagacggaggtcagtaatggcaaaccatcgaggcggttccggcaattttgcagaagaccgcgaaagagcatcagaagcaggtaaaaaaggtggacagcacagcgggggtaatttcaagaatgacccgcagcgcgcatctgaagcaggtaaaaaaggtggtaagagcagtcacggcaaaagcgacaactagccgggctaatcaatgacgaatgcatttttgtctgtagctcgtcaaaaagccatcaccgccggttacccggtggttgatactgatgacaaatgtaagcttgcctgatgcgcgatgcttatcaggcctaccagaagattgcaatatattgaatttgcactgttttgtaggccggataaggcgtttacgccgcatccggcatgaacaatgcgtacgttgtcaacaatctgcaccgccggtaaccccggcggttttctgtttatggctcctgatgaacaacttctggcggtggaacgtcaaccaactttctgcttaacaacgcattgagtaaaatcgcgccaaaggttgctgtaccaatccctcccaacgtaaaaccgcccagcgtgagagcaaaatcacccgcgcccagcactaaggttactgcgaccataatcaaattaccgttctggcttaaatcgacacggttttgtacccatatccttgcgcctgcgacggcaatcagcccgaacacaacaattgatgcaccaccaataaccgcggccggaatggtatgaatcagcgcaccaaatttcggtgaaaagcccaacagcatggcgatgacggcagcagcaacaaacaccagcgtcgagtagactttggtcacggccatcacaccgatattttcagcataggtggtcacgccgctaccgccgacagagccggaaagcatcgttgccagaccatcgcctacgaatgcccgccccatatacgggtccatattgcgtccggtcatcccggcgactgccttgagatgacctaagttttccgccaccagaatcaccgccacgggcgcaatcagcatcattgcctgaccattaaaagcaggagtggaaaaatgtggcagaccgaaccaggcagcatggctgacgagagtaaaatcgacggcttttcccagccctaaaacgttggtcatcacgccatacagcagacaggcgacaattaatcctacgagaatcaataaccgctggatcatgccacgggtaaacaccgccaccagcccaatacacagcaccgtcattaccgccatccagctatcaaaggccgaagccgatacacttttcactgcgataggcgctaagttcaggccaatcgccatcaccaccgcacccgtcaccaccggcggcatcagtcgttcaatccagcgcgtaccgattttcatcaccaccaggccaatgacggtataaaccagcccacaggcgataatcccgcccagcgcaatgctgatattcgggttaatgccctgaccgttaaagcccgtcgcggcgatcaccacgccgacaaaagccgcgctggagccgagataactggggacgcgcccgccggtaataaagaaaaacagtaacgtgccgatccccgacattaaaatggaaagattgggatccagccccatcagaatcggcattaacaccgtcgcgccaaacatcgccaccgcgtgttgaacgcccattactgccgtctgagcaaacggcaatcgttcatccggcgcgaccacgccgctctctgtagaggtcgattttaactgccagtgaggaaaaccgaacattgccatcagctgtctccttaaggaggttaacaagcagggcgcatcagcgcgtgataactgcgatcgaaccacaccagcccgtagggtgtggtgtgacgatgaatcgcttcgatggcgcaaaacagaatgtcgtgggtgccgacgctcaccacctggctgatacggcagtcaaacgaaaccagagcctcttccagttgcgggcatccggtcacccccgtctgccagcgggcggcggcaaagcggtgttccatgggcgttttgccgccaaaaaggtttgaaagcggctcctgcccggcgctaagtgtatttacacacagcgttcgattttcattgaatgccggccagacggacgccccacgattcaggcacaccagtaatgtgggcggcgtatcggtcacactgcagacggcgctggcggtgaacccggcgcgcccggctggaccgtccgtggtgataatattgaccgccgcgcccatgcaggacatcgcatcgcgaaaagtttgttgatcgacaatgttcatagtttgctccttacaacagcccgcaggcttcttcaaaggacagacgtggcaggcgcgcataaagcttgctgctatcgccatagccgatattaatcagcagattgctcttcagcgtgctgcccgtaaaaaaggcgtcgtccacgtgttgacggtcaaagcccgacatcgggccggtatccagtcccagcgcccggcaggcgacgatcagataggccgcctgcatggaactgttgcgaaacgctgtttcttcggcaagttgtgggctggaggtaaaccaactgcgggcatcaccgtggggaaacagtagtggtaaccgttcataaaattcactgtcccaggcgacgatagcggtgacgggcgcggtcagggttttttgcagattgccgctggaaagtgccgggcgcagacgttcttttccttctgccgtgcgggtaaacacgatccgtgccggagaacagttagctgatgtcggcccccatttcatcagggcataaatctcccgtaacgtctcatcgctgacgggtgtctcccgccagccgttgtgagtgcgggcatcggtgaacagggtgctaagcgcacctgggctaacggcttcgttcatagcaattccttacagggcggcttcacggtgatgtaacaggctggcaagcccgttgagtaacagagcattaaacgtttcgggatcggtcacgttgcaggcgtgtccgccatagggcatcaccattttctggctatcgggcagggcggcatgaagttcactggaacatgctgttggcaccagcagatcatcactggcgcagatgatttgcaccgggcagcggatgcgatccgcatggtgactaaagtcagcgcgtttgagggcgttaagtcgacgcagtaaattatttttgccctgaaaatgcgccagtgccagcgcgtcttctgcctccaggcgaggtgcgcgggccgccatccagtcggcgggatagaggaacaacggctgcgcttccacccatgcctgcgcgccgccgctatacagtaatcgttcgcgaacctgaaaacagcggcgcgtatgggcgtttattcgtagccagccgttaacgctgatcagcacagttaccgacgcgggataatccagcgccagctgcattcccaccagcgcaccgagcgcatggccgaccactgcgtaatgctcaatccctgcggctaccagcgcctgatgcagttccgctgccatctgggcgatactgtaatcttctgccagcgtgtcgggattattgccggtgccgcgctggtcgtaacagactacctgatactcctgctccagcaccgccagttgcggtaaccagtaactgccgctacccccaagacccgaaatcaacaccactacgggcgcatcagcataagggggaggtgagagtgaaagtttcatcgcggcctcacttggcgatatgcgcaattgtggcgatttccaccagcgcgtcaggttttaccagtccgcactgaatgcagaatcgcgccggtttatcacccggaaaaaactcggcgtagatttcgttaatcgcggcgtaatttttccagtcggtaataaagatgctgttgaaggtcacatccgccatcgtgccacccgccgtctcgatcaccttgcggatagtttccagaacgtggcgggtttgcgcctttgggtcatcggcaaacagcacgttattatgttgatcaaaagccagcgtaccggagacatacaccacgccatcagccagcgtgccgggaacgaagggggccagcggtgcgctgctgccagcgggaataattacggattttggcatcgttaaactccttaagcgatatgagcaaaggacgtgggagaaagcgcgtcgcagaatgtttcgacgtcgctgacccagccaaaaaaggtttcgatattgaacaacgcggctttctgcgcaaatttcggccccgcctggtgagttgcgtcttcaagcaccacgccgaaatactccagaaaaaagccgtcgcgtagcgtcgattcgacgcagacgttggtagcgatgccggtgaaaaccagatggcgtattccgcggctgcgcaaaatgctgtccagcggcgtattgaagaaaccgctgtagcgcggcttcggcagcacaatatcgccaggctgcggcaccagttcatccaccagttgataatcccaggagcctttcgccagcaatttcccctgcagctgcggctgcttacgcatggttttcagggcgttcgatttatgaaaattcggtgagccgggtccgccagcctcgacatactgttcatcccagccattttgaaaccagatgatcagcatccctgccgctcgcgctgcggtcacggcggtttgaatgttggcaatgaccgggcgagtggttgagacatcaaacccggcgagatctaagtagccgcctggcgtggcataagcgttttgcatatccaccacgatcagcgcactttgctgcggatcgaaggtaatggcttccggtcgagcggttaaggtcgtcatcatgccacctcctgagtcagcgcaggtagatgggcgcggcattgcatcagtggttgaatgcgctcgccgaaggtttcgattcccgacagaaaatcgtcgaaggttaacagcacgccttcggcaccaggcacgcttgcgacttcatctaacatgcgcgcgacactggcgtaagaaccgactaacgtccccatattgatgtttaccgccgaagtgggatcggccatctgacgaacgttggtgtcagtaccggagcgggtatctttctgactttgttcggttagccagcttaacgcctcttcatccgcgcccgctttgtagtgttcccatttggcgcgagcggcatcgtcggtttcatcggcaatcaccataaacaacacataagagccaacgtcgcgtccggtttgctctgcggcctgtttcatccgcgcagcggtcggggcgaaagccgtgggtgtatttacgcctttgccgaaacagaagttgaaatcggcataccgggcggagaacgccatgccagcgtcgctttgcccggcgcagatcactttcatggggacactcggttgcggactcacgcgacaatcattcatggtgaaaaaatcgcctttaaaatcgcttttccccgtgccccacaggtcgcgcagcacctgaacatattcggtgagatagtcgtaacgacgggagaaatagtcatcgccaggccagatacccatctgctcatactcgggcttttgccagccagtcacgaggttgacgccaaaacgcccgccagagatggagtcgatggttgcggccatacgggcgacgattgccggaggtaacgttaaggtggcagcagtggcgtaaatctgaatgcgcgaggtcacggccgccagccccgccatcaaggtgaacgactcaaggttgtgatcccagaactcagttttgccgccaaagccacgcagtttgatcatcgacagggcgaaatcgaaatggtagtgctccgctttttgcacaatggctttattcagttcaaaggtcggcatgtactgcggcgcgtgggtcgaaatgagccagccgttgttgccaataggtacgaatacgccaattttcatcatcaacctctcttcgtctcgtaaagtgaaagtcagacggggcgctgcatcctgcatatccttttcagccgcgtattggcttgtttgcaaagcggatgccagtttttaaaaagttaatgttattaatctgttaacattacgttatctaaaatatctggtaaaaagtggactaaacggtcaaaacagttgcacataaaacatgcatctgtgcgcgatgagagtgcagaaggtcgaggccgggcgggggttttgctatcctgttgccaatctacaagaggggagagcgcatgacgcaaggcgcagtgaaaacaacgggtaaacgttcgcgcgcagtaagcgcgaagaaaaaagcgattcttagcgcagcactggacactttttcacaattcggttttcacggcacaaggctggagcagatcgcagagttggcgggtgtttcaaaaaccaatctgctgtattactttccgtcaaaagaggcgctgtatattgccgtgctgcggcagattctcgatatctggctggcaccgttaaaagcgtttcgtgaagatttcgccccgctggcggcgatcaaagagtacatccgtctgaagctggaagtctcacgcgattatccgcaggcttcgcgcctgttctgtatggagatgctggcaggcgcgccgctgttaatggatgaactgacgggcgatttgaaggcattaattgatgagaaatcggcgctgattgccggttgggtcaaaagcggcaaactcgcgccgattgatccgcagcatttgatttttatgatttgggcttccactcaacattacgccgatttcgcccctcaggtggaggcggtgacaggcgcgacgttgcgcgatgaggtatttttcaatcaaacggttgaaaacgtgcagcggattattattgaggggattcgaccacgttaaagatgccggaggaggttgtaacatcctccggctacctgtttaacctatagtcattaagctggcgttaccgccagcggcagcggtattcacactcagcgaacgctcgatatacagccgttccagaaggatattgctttcgccacgggcaaaaccctgcaccgaaacaattgtgccatcccgcgcggcaactgcttcacacaatgcgcgaagctgatccgaatcaccgtggaagatcaccgcatcaaacggttgagcggttatattttccgctttcgccagttgaatacgttcgctgactgccgatggcaatgccttcactaactgacgatgcagcgcgtcatccggccacagtacctggctgcccaccgccagcacggcggcgagctgagtcagcgcatcctgctcatcatcggcaatacacaacacgcgctcacgcggcagcagcgtccaggtgttgcgttcacccgtcggccccggcagcaatcgttgtgttcctgcctgcgccagctcgccatattgcgtacataacgcctgcaattctggacgatttgctgcccattcccgcagtgcatttagcggctgagtcaatgcggctttcaactgcgcatcgaccggatactttgcatcctgacgcgcgagcgtcactgccagcgcactttccgggcgattcgccagcagacggtagagatagagcggaccgcctgctttcggcccggtaccggacaacccttcgccgccgaacggctgcacaccaaccactgcgcccaccatattacggttaacatacaggttaccaacatgggccgagccagtgacctgggcgatggtttcatcaatgcgcgtatggacgccaagcgtcagaccataaccggaagcgttaatctgctcgatcagctctggtagctggttacggttgtaacgcaccacatgcagcaccggaccaaagacctctttttgcaattcggcaaagtcatccagttcgatcagcgtcggggcgacaaaggtgccgctttgccattcacgggcatcttcgctgttttcccgcaccgcctggaacaccggacggcctttgctacgcatggtctgaatatggcgctcaatattggctttcgcttcgctatcaatcactggaccgatatcggtggtcaggcgacccggattacccatccggcattcggccattgcgccgcgcagcattttcaacgtgtggtcggcaatctcatcttgcaggcacagcacgcgcagcgccgaacaacgctgacccgcactgtcgaacgccgaggccagtacatccacgacgacctgttcggtcagtgctgaagaatcgacaatcatcgcgttcatgccgccggtttcagcgatgagcggaatagggcgaccctgagcgtccaggcggctggcgatattgcgctgcagtaacgtagcgacttcggttgaaccggtaaacatcaccccgcgcacgcgatcatcacccgtcagttgcgcgcccacggtttcaccccgacctggcagcaattgcaccacgcctggcggtacacccgcttccagcaaaatggcgatcccttgcgcggcaatcagcggcgtttgttctgccggttttgccagcacgctgttacctgccgccagtgcggcggcgatctgcccggtgaaaatagccagcgggaagttccacggactgatacacaccacaggccctaatggacggtgggtttcgttagcgaaatcatcccgcacctgtccggcgtagtagtggagaaaatcgaccgcttcgcgcacttcggcaatggcgttactgaaggtttttccggcctcacgcaccagaataccaatcagttgctgcatctggctttccatcagcacggcagcgcggtgcaaaatcgctgcgcgttcagccggaggcgtggcaaaccagattggcgcgttattaaccgcactttccagcgcctgttctacttcacgcggcgtggcttcacgcacatagcccacaatatctttcggttccgcagggttaataacgggcgacatctcacctgccgctaccggttgttccagcattggcaaggcctgccatttttgcagtgcactattgagcagggcagaggagagcgaggccaggcggtgttcgttagcgagatccagccctgccgagttgtcgcgcccgtgaccgtaaagatcgcgcggcaggggaattttcggatgcggtaatccagtttgcccttcctgttgcgccagtttttctacagcagtgaccggatcggcgaccagttcatccagtggcaaagaggtgtcggcaatacggttaacaaacgaggtgttagcaccgttttccagcaggcgacgcaccagatacgccaacagcgtttcatgtgtgccaaccggagcataaatacgacacggacggttaagtttgccgtcggcaactttcccggtgacctgctcatacagtggctcgcccataccatgcaggcactggaactcgtactgacccgggtagtagttctgccccgccagttgataaatcgccgccagcgtatgggcgttgtgcgtcgcgaactgcgggtagattagattcggcaccgccagcagctttttcgcacaggcgagataagaaacgtcggtatacaccttgcgggtataaaccggataaccttcaaggccgtccatctgcgcacgcttaatttcactatcccagtacgcgcctttcaccaggcgaatcatcagacggcgacggctgcgggtggcgagatcaatcaggtaatcgatcaccaacgggcagcgtttttgataagcctgaataacaaaaccgatgccgttccagcctgccagttccggctcgaaacagagtttttccagcagatcgagggagatctccaggcgatcggactcttcggcgtcaatgttgataccaatatcgtactgacgcgccagcagggtgagtgatttcagacgcgggtaaagctcttccattacccggtcatactgggcgcggctataacgcggatgcagcgccgacagtttgattgaaatgcccggcccttcatagatgccacgaccgttagacgctttaccgatggcgtgaatcgcctgctgataggaaaccatatacgcctgtgcatctgcggcggtcagcgcggcttcgcccagcatatcgtaagagtaacggaaacctttctcttccagcttgcgggcattggctaacgcttccgcgatggtttcgccagtgacgaactgctcacccatcaggcgcatcgccatatccacacctttgcggatcagcggttcaccgcttttaccgataatgcggttcagcgagcgggagaggctggcttcgttatgggtggaaaccagtttgccagtaaacagcagcccccaggtggcggcattaacaaacagtgacgggctacgaccaatgtgtgactgccagttaccgttgctgattttgtcgcgaattaacgcgtcgcgggtggctttgtcgggaatacgcaacaacgcttccgccagacacatcagcgccacgccttcctgcgatgacagcgaaaactcctgcaataacccctggaccatacctgcgcgaccactggcatttttttgattacgcagtttatcggccagctgatacgccagtttgtgcgcctgttcagcaactggctgcggcaggcgggcttgttccagcagcatagaaaccgcttcggtttccgggcggcgataggccgcggtgatcgcggcgcgggaaaccgactggggcaatatttgctcggcaaagtcgaggaatggctggtgtggttcctctgccggagtcggtgcttcatcgctctcattggccgcgccagaaagcagcgcaggtagctccggcagagtatcgctgttttccagttgttcgagataagaaaaaatcgcctgcttaattaaccagtgtggtgtgcgatcgatacgtgtcgcggcagacttaatacgctcacgcgtcgcgtcgtccagcttaacccccatggtggtggttcccatgccattactcctgttgttcagaaaggtgcaacttaacgttatcgtgaaatatccatgatgttgcaactttgtgcaaccatgttaaatgtgacatgcgtagcaagcttaaaaatgaatgaaatgttaataaaagaaatcgatatgacagggattaaaaaaataactcagactttttctctgcggcagttaacatttttgaaaggtgcaaccgcaaaaaatgtgagagagtgcaacctgatgaaaaatagtgtcgctgagcactaaaatttaatgtaaatggtgtgttaaatcgattgtgaataaccagcgcttccggcaggatacggtcgccctggtaaaacataaactctgttaccccgttccggtggcagatataacggcaagtttcgacattgccgataataattttttggagactttagatggctattagcacaccgatgttggtgacattttgtgtctatatctttggcatgatattgattgggtttatcgcctggcgatcaacgaaaaactttgacgactatattctgggcggtcgtagtcttgggccattcgtgacggcattatcggcgggtgcgtcggatatgagcggctggctgttaatggggttgccgggcgctgtttttctttccgggatttccgaaagctggatcgccattggcctgacattaggcgcgtggattaactggaagctggtggccgggcggttgcgtgtgcataccgaatacaacaataacgccttaacactgccggattatttcaccgggcgctttgaagataaaagccgcattttgcgcattatctctgcgctggttattttgctgttcttcaccatttattgcgcttcgggcattgtggcaggcgcgcgtctgtttgaaagtacctttggcatgagctacgaaacggctctgtgggcgggcgctgcggcgacgatcctttacacctttattggcggtttcctcgcggtgagctggactgacactgtacaggccagcctgatgatttttgccctgatcctgacgccggttatcgtcattatcagtgtcggtggctttggtgactcgctggaagtgatcaaacaaaagagcatcgaaaacgttgatatgctcaaaggtctgaactttgttgccattatctcactgatgggttgggggctgggttacttcgggcagccgcacattctggcgcgttttatggcggcggattctcaccacagcattgtccatgcgcgtcgtattagtatgacctggatgatcctctgcctggcaggggcggtggctgtcggcttctttgggattgcttactttaacgatcatccggcgttggctggtgcggtaaatcagaacgccgagcgtgtgtttatcgaactggcgcaaattctgtttaacccgtggattgccgggattctgctgtcggcaattctggcggcggtaatgtcaaccttaagttgccagctgctggtgtgctccagtgcgattaccgaagatttgtacaaagcgtttctgcgtaaacatgccagccagaaagagctggtgtgggtagggcgtgtgatggtgctggtggtggcgctggtggcgattgcgctggcggcaaacccggaaaaccgcgtgctgggcttagtgagctacgcgtgggcaggctttggcgcggcgtttggtccagtggtgctgttctcggtgatgtggtcacgcatgacgcgtaacggtgcgctggcggggatgatcatcggtgcgctgacggttatcgtctggaaacagttcggctggctgggactgtacgaaattattccgggctttatcttcggcagtattgggattgtagtgtttagtttgctgggtaaagcgccgtcagcggcgatgcaaaaacgctttgccgaggccgatgcgcactatcattcggctccgccgtcacggttgcaggaaagctaagggacttagcctgcggcggttttgtttggcttcagcagcgggttgcgctcccttaatgtgcctcgccatataaattgaatggtgcagggagcgcgcagggggcggccaatcgccgccgccccctgctgtcccggccttcggggaacgcttcagcgattttgacgccaccaacacccgagctgttattatgttccgggcaaaaagttagatttgataatcgcggatggacgaaattgcttgatacacccgcttatcagttttacatggaagctctgatgcattgagtctggacagttttgtcggctggatacggcgtttacgcggcatccggcaagaacacatggttctttgcaaacaatcccatctttctaccctggaataatcgtttatatcccttggcattacctctctttgtttacattccaacatcattttataaacattccgcttgtgtttttctttgccgtaatgataatcgctatcactgcgatttacttttctttgcatagattgactcagaaaaacgtttaagggtgggtggcatgtttgttccgtttctcattatgttgcgcgaaggacttgaagccgcgctgattgtcagtttgattgccagctatcttaagcgtacccagcgaggccgatggattgtgtgatgtggattggcgtgttgcttgccgctgcgttgtgcctgggcttgggtatcttcattaacgaaaccaccggcgaatttccgcaaaaagaacaggaactgtttgaaggtatcgtggcggtgatcgccgtggtgatccttacctggatggttttctggatgcgcaaagtgtcgcgcaacgtcaaagtgcaactggaacaggcagtcgatagcgcattgcagcgtggaaatcatcatggctgggcgctggtgatgatggtcttttttgccgttgcaagggaagggctggagtcggtctttttcctgctggcggcatttcaacaagatgtcgggatctggccgccgctgggtgcaatgctcggtcttgctactgccgtggtgctaggcttcctgctctactggggcggtattcgcctcaatcttggtgcattttttaaatggaccagcctgtttattctcttcgtcgccgcagggctggcagctggtgccattcgcgcatttcatgaagccggattgtggaaccactttcaggaaatcgccttcgatatgagtgcggtgctctcaactcactcgctgtttggcacgctgatggaagggatttttggctatcaggaagcgccgagcgtcagcgaagtcgccgtctggtttatttatctcatcccggcgctggtggcatttgctctgccaccacgcgcaggggcgacagcgtctcgctccgcgtaacaaatacgacgcaaactcttgcttagttacaacatactttaaagggatagtctcgtcatgaccattaacttccgccgtaacgcattgcagttgagcgtggctgcgctgttttcttctgcttttatggctaacgccgctgatgtgccgcaggtcaaagtgaccgtgacggataagcagtgcgaaccgatgaccattacggttaacgccgggaaaacacagttcattattcagaaccacagccagaaggcgctggagtgggagatcctcaaaggcgtgatggtggtggaagagcgggaaaatatcgcccctggctttagccagaaaatgacggcgaatttacagcctggcgaatacgatatgacctgcggtctgctgactaacccgaaagggaagttgatcgtcaaaggtgaggcaacggcggatgcggcgcaaagtgatgcgctgttaagtcttggtggtgcaattactgcatataaagcgtatgtcatggcggaaaccacgcagctggtgaccgacaccaaagcctttaccgacgcgattaaagcaggcgatatcgaaaaagcgaaagcactgtatgcaccgacgcgccagcactatgagcgtattgaaccgattgctgaactgttctccgatctggatggcagcattgacgcccgtgaagatgattacgagcaaaaagccgccgacccaaaattcactggtttccaccgtctggaaaaagcattgtttggcgacaacaccaccaaagggatggatcagtacgctgagcagctttataccgatgtggtcgatttgcaaaaacgcatcagtgaactggctttcccaccttcaaaagtggtcggcggcgcagccggactgattgaggaagtggcagccagcaaaattagcggtgaagaagatcgctacagccacaccgatctgtgggatttccaggctaacgttgaaggctcgcagaaaattgtcgatttgctgcgtccacaactgcaaaaagccaacccggaactgctggcaaaagtcgatgccaactttaaaaaggtcgataccattctggcgaaataccgtactaaagacggttttgaaacctacgacaaattgaccgatgccgaccggaatgcactgaaaggaccgattactgcgctggcggaagatctggcgcaacttcgcggtgtgctgggactggattaagcgttatgcagtataaagatgaaaacggcgtgaatgaaccgtcacgccgacgtttactgaaagtgataggtgcactggcgctggcgggaagttgtccggtcgctcatgcacaaaaaacgcaaagtgcgccgggtacgctttcaccggatgctcgcaatgagaaacagccgttttatggtgagcatcaggcagggatcctgacgccacaacaggccgcaatgatgctggtggcgtttgatgtgcttgccagcgataaagccgatcttgagcggttgtttcgcttgttgactcagcgttttgcttttctgactcagggcggagcagcaccagaaacgccaaatccgcgcctgccaccactcgattccggcattcttggcggctacattgcgcccgataatctcaccatcacgttatcggtgggtcactcattgtttgatgagcgctttggccttgcgccacagatgccaaaaaagctgcagaagatgacgcgtttccccaacgactcgctggatgcggcgttatgtcatggtgatgtgttgctacagatttgcgccaacacccaggacacggttatccatgcgctgcgcgatatcatcaaacacacgccggatttgctcagtgtgcgctggaagcgggaagggtttatttccgatcacgcggcgcgtagtaaaggcaaagagacgccgattaatttgctgggtttcaaagacggcactgccaatcccgatagccagaatgataagttgatgcaaaaagtggtgtgggtaacggcagatcagcaggagcctgcgtggacaatcggtggcagctatcaggcagtacgcttgattcagtttcgagtggaattttgggacagaacgccgctgaaagaacagcagacgatttttggccgtgataagcaaaccggtgcgccgctgggaatgcagcatgagcatgatgtgcctgattacgccagcgacccggaagggaaggtgatcgcgctggacagccatatccggctggcgaatccccgcacggcggagagtgagtccagcctgatgctgcgtcgtggctacagttattcactgggcgtcaccaactccgggcaactggatatggggttgctgtttgtctgctaccaacacgatctggaaaaaggcttcctgacagtacaaaaaaggctcaatggcgaagcgctggaggaatacgttaaacctatcggcggcggttatttttttgcgctgccgggggtgaaggacgcgaacgattatttcggaagcgcgttattgcgggtttaatgtttttaggcggataaggcatttgtgcgcagatgcctgatgcgacgcttgcgcgtcttatcatgcctacaatcagtgcgggtttggtaggctggataaggcgttcacgccgcatccggcgatcgtgcactgatgcctgatgcaaatcctgctgaaagcacacagcttttttcatcactgtcatcactctgtcatctttccagtagaaactaatgtcactgaaatggtgttttatagttaaatataagtaaatatattgttgcaataaatgcgagatctgttgtacttattaagtagcagcggaagttcccggcagtgatagtcagtcactatggagatcgcggatggtaacgtcctgtactggacatgttttagataatcaacgcgccaccactcgcggagttttctcctccggtagtcatctcgtcactttgcattttcaacctcatcctttcttttcatgtgttaccgacgccgtaaacggtgcgcgtagccgtttttcggcattttatccaaaagcaaactatggcttacaaggaagccaaccctctgatgttcgtgcgcataatcgcgctgccaacggcgcgtgtgatgaatacaaacaactcaaggtgctctccatgggaagacaaaaagcagtgatcaaagctcgtcgcgaggcaaaacgtgtgctgagacgggattcgcgcagccataagcagcgtgaagaagaatcggtcacctcgcttgtgcagatgggcggcgtagaagccattggtatggcccgcgacagtcgcgatacttcgcccatcctcgcgcgaaatgaagcgcaattgcactatctgaaggctattgagagtaagcagctgatattcgccacgggcgaagccgggtgcggaaaaacctggatcagcgcagcaaaagcggcagaggccctgatacataaggatgtcgacaggattatcgtcacccgtccagttctgcaagccgatgaagatcttggcttcttacctggagatatcgcagaaaagtttgctccctattttcgcccggtctacgacgtgctggtccggcgcttaggggcttcctttatgcagtactgcctgcgaccggaaatagggaaggtggaaattgcgccgttcgcctatatgcgtggacgtacctttgaaaatgcagtcgtcattcttgacgaggcgcagaatgtgactgccgcgcaaatgaaaatgtttttaacccgcctcggggagaacgtgacggttatcgtcaacggtgatatcacgcaatgcgatttgcctcgcggcgtgtgctccggattaagtgacgcgctggaacgtttcgaagaagatgaaatggttgggatcgtccggttcggtaaagaggactgcgtacgttcggcactttgccaacgtacgctgcatgcctacagttaagtgtgttatcggtgcagagcccgggcgaaccgggctttgttttgggtgtttatgcccggactagcgctttttctgaaacaaccatttttatttgcccctggctggtgaagtgtacgctcatcctgtggcttttttgtagttgctgatagagctcatcaggtattgctaagctctctgcatattcttgcggcgtatattggtaggctgcatgatgctgctgtttttgaaaacgcagcttattgtacagcgcccagacaattaacacgacggcattcgccactgccagcaaaaaatagaactgaagtcggcttctggcctcgctttgccagtaataacccgtcagcagatccatggcgaataagaatatgaacaacgcaaataatgtccacaagatggttgtggcaacataatcaaccagtaaacgtactggtgattgtcgggtcgtaataattaaattgttcatattaacctctcagaatcccgcgatcgggacttacccaacgggcgcgttgctttttaggcatcaacatgactcgtgtaaatgataccaatgtcgttgccaggctcagcatccagaaaataaccgggaaccaaataatccagaaaagcgatgaagtcagattatgctcatagcgattctcgatcatcaggctgacaataaattgcagtaaacataacgtacacaataatattccggcagtatgtgtcgcagcgatatgtgtcaattcaatatttaacggtacaccggcaagttggactgcgtaaataatgaaaccgaccaggcaggtgaaggcccatattgtcgtcaggcagtattcaaaaaacagcggccacattcgaaagttttctttgcgccacaaccttgtcatatttttgaggaatacttctgcaccgccctgagcccagcgcaggcgctgtttccacagcccttttaacgtttcaggcattaatatccagcacagtgcccgtggctcgtaaaaaatcgtccactgattcaactgcagcttccagctaatatcaatatcttcggtgatcatatcgtcactccagtaacccacttctgccagggcgctgcgacgaaatgcggcaataacaccggaaacggtaaatacgtttccatagatacgctgggttcgcttgatcaaaccaataattgaggaatactcgccaacctgaattttacccaccagggtagaacgtgttcgaatacgaggattaccggttacggcacccacacgcgggttgtacaacatcggttccacaatatatgccgccgcatcgcggtctaataacgcatcgccatcaatgcacaccagatattcacttttcgccgcggcagctccggttttaagcgcaatggctttcccctggttttgcgccagatgaatgacccgcaaatggggaatttgtgcagccatgcgatccaggatggcacgggttttatctgttgaaccgtcatttacggcaataacttcaatgttctcataacgctgtgctaaagcggcgtgtatggtttcctcaacgtttttctcctcattaaaacagggaatgataatggagatagacggattatctttcaactggggagctggtgcgttttctccccacggccagtggcgttcacgatagacccagaaatagacgccgccaacaatccacataatggacataaaaaacggccagaagaaaacgaacctcatcatcagttcaccagagtgaaagtacgctacgcataggggtatgcataacaccagacataatataaaaaacgatacgatgcgattaatcatttttcggataccaggctgttgaaaactcaggacgaataaggtctatttcaggttggttatgcagaaaattgtcgggataataaccatagtttttcactccattcagttgtaataggctcatccagtgagcgagttgttgcgaagaaatagcctgatgctgaccatttttctgccagttttgtgcctgtaattctaaaatagatttgtctttagcctgagggatgtttttaatttgattggtcaattgtattaaccattggtcagccgatttttctgcgacaccttccagataaggcatagccataatagcggtccagtcatagctttttaggaaatcagcataattctgtgcaaaccaggcttcactttcaggttgtattaccggaagtgcaaaaatatttcgtgcagttttaatatgtggaccgcgaatggcttttacgcgcgcactaagttctaaagtgaagtcagttaacgcacgacttttaaagcgggcccactgtttaaattgctccgggttttgtcgaatttcgctcagactcccgctaaagcctgcttgctgataagccgtgatagccggtgcactggcatcttcataatctgaaagcaaagcatcatcgtggaacaatatgccatcaaaagcagcatgtccggcaagatcttcatataacatgccaacttgtgctctgactctgtcatcgaaaggagagagacggtgatattgttcaggatgaatttgtgcttttttctcccctgttggtaagtattttactcgcgttaatgtgggatctaaatcccagcttaataccggcatccacgcatagatgtttacacctgagcgggtacgtaattgccaggcaacccgactaaaaatatctgctttcattggtagcaaacgatttggaaaccagacctctttgaccagcccatcaccatcgggatcagcaaatgcctgcaaatacacggttgatatttgcatatctttcacccgctgaattagcacatcaatattgcgatccatttgctggaggttttcgtcataaacgtaatcaagatcgatatgcattatccgttgtggtgatttttcctgtacggtaataatttgctgggcaaactcttttaatgagggattattggcgattaatacccgcggaatggaatccaattgcgacgcatttgccaaacctgattcaagggtgaagaacatgtcataaccgagtttttttaattcctctatcgctatgccattcgcttcgccataaggccaaacaaaaacgtgtggatttacctcaacctttgtacgcaggtattccgtcatttttacagcatccagacgaattctttcccggtattctgctgcggtttcataccgtgcgtggtcagtaaaatatgcacgatttacatatacaggcaataagctgccggtggcattagcctgaataccgtagtgagaattccatgtatgagaagcgagctcaacgagccgggaacgcgcaacttctcgcacttgttgccacgtggcaaaatattctcgatcgaccaactcatcgccaaattttacttgtttatccgctggcgtatcgacccaactgccgacgggggcccatacagcaggccactggaaggcctgaagaattgggaagacgcgggtataaaaactctggtagccgtcatcaaaagtcagcactacagctttttccggtagcggttttcctcctcgatgtgcttcacgaatttgagcaatactgaccggttgataaccgttctcgcgcagccaggcaaattgttcacgcagtgctgatgtccgcactgacataaaacgctggtcggcagcttcgtcttcaacgttatgccatgaaatcgctacaaaaccattatgcggccacggttgctcggcgagtaaagattcgcgatcctgtggcggtataaatgatgttcttgactggctaatgcacgcggtgagcataattatactcaccagcatcaggagatatttatttccattacgtaacatatttatccttaaaatctgaatgtcatatcgaattcaacgtataagttgtgttctctgtcaccgtcataaggtcgtttttcccagcgtagcgttgcgccagcatcaatcacgtcattccaactaatgcgttgcccgtagccgagttgggtgacgacatccgtgccataatgtttttgccaggaggcaccaacacctgcgctgaatatttgctcccagctattttcatagcttcgccataacaaatggcttgcctcaaatgccggaacaatatcgaacgtttttatagggttgtagtatggggtatcgtgttctgtattttgttcgtaatacagactgggtaggaaatcgacaatcaaatatggtgaagaccagatgcgttcctgaccctcaagtgagacttcatgacgctggttactgtcggaaaaatcagtgaaagcccaggagacaccgtacttacgccgctcattttgataccagcgaacataagcctgagcactgttgcctgtaacaccatttttcattgcccgtaatggaacgcggtgagagaggcgttccagttgcgaaccaatacgccagttatcattaaaatcataccagccagacaggcgcgcgccgggtttatgctcatgattgaaaacgcgttcagcgtactctgcctcgagccagatattacgtgaccgccactcaacacccgcaagccagtcgcgaacaatcccttttccttcgctaaattgtccatcggcataaccgaatccagcaaaaccgcgccagttatccttcagcggtggtgaataaacgatggtggttaagtcgacatcatgtttaccactatccgggccttcggcatcaattcctgttgagccagcgatacgaagctctgcaagattatgtacatcaaccgcacgttttaatcgtacaacgccgggatcttgcggttcacgttcgacaacatcgtgcgttaagacagctgcctgctgccattcttgtaacgttaatgctgtccaggcttgttcaacctccagattaatattacgtggctcgatcacttctgctttttttaattcattttctgctgcacgaggccaaccgcgggcttgtaacacactcgcgtaatcaatgcgcagtccctgatttcctggtgcgttataagcaagctctctggctgtcatttcagcctgaggaagatcattactatattttgctacggttgagagaaacgaatgcccctgtaaccaggtatcattcgggatgctcgtaggcgtgcccattaaccgaaggaaaggcggcgaagtattaatggtatgttgggtgacagttagcgcgcccggataattttcactctccaggtggctgtaaaagagatccgcaagttcttcatcggataaatccggggcaatggtctccttgtgataaaagagctcggtcattattgactgtgcttttttcggctgatgatctttgagataagccgatgcaacccaatattgcccccagggcggaataatttgccccgtcttttttaatcgctgatagtgagaaataacgtctttataacgatcgcgagttaataacgcgccaagatgatcaacctgaatacgctggtactgggcagtgcggtctgggttatcgtgccacagaatttctaatgcagcgtattgggcgagggcgcgatcggcaatggcataacgttcactttcactgcgcgtaggcataaacgacagtctgaccagttcggcatgaatatcagcgcgaatatctggcgttaaattggcatcgtcaatcgcggcagcaagttgattattacgtaatgcctgcacgtattctgtgggatattgttgcgtagatgcattttcaggtaatgactctgtcatcgcccgtaattcatcctgatgacgccccgccagtttatagatataggcttctgcgagtaaattggctttgtccggtgctccagagttaagctgcttaagtttaaccagcgcagtatcatagtgaccagcatctgccagggttaaaatttgtccccgttgataatccttattttgcggctccagagagagcgccttttgccacagtgtaagcgagttttgccattgttgcaggttacgataagcgacggcgacagctgcataaccacgcgctggtaattgctgatgacggtagcggttgtaaacggtaataacctgtttatcttgcccggcccataaggcaatctgtaaccagtcagcaatttggttattgctgagtgctgattttagtgcaaaccatgacaaagctggctgagtattacccttgcgagcttcaataatcaatgcatcataggcgttattaacagcactcttcgccgcgggactcgctgctaaaaatgcggcagtaagaagtttcaaagcccatttggttttcgggcacctttttctgctacttgaatacatcctgtattactccatgtattgccaaaatctctctctgtatctaattacaggtaactgaaaagaaagatatttttgcacctcataatccgttattaaacgcggaagagagacgtgaattgttgatgatgagaagaagaaatgatgagcagagtgtccatataaaatccttttctcgcccgaaaatccattccaatgatgaggatcttcaggaatacggcataaatcccaatgcctttttcaaaataaattaggattaaaataattaaatcagtaaattccgatgcatgatttcggatttttcgaaagtcctgatgaaaggctgcgctacggcactcacggatttaattgttattcctaatgtatctatgaattaatgttttataaggattttctataaccatttataagtattttcaagcctggcttgttgcaaacaatgtataaagcacttaggcaataataattacattcagcaactatcatcatcggtattgtttgtgggcggaatttcatattgacaacagtacagttcttatatctattaataatagaaagggatctacaacctacagattggtgtagctttatggaaaaagactatttgagaattagtagtactgtattagtgagcttattgtttgggcttgctttggttttggtgaatagttggtttaatcagccaggcgttgaggaagttgttccacgatcaacctatctgatggtaatgattgctttattttttatcgatactgttgcatttatttttatgcagttgtatttcatttatgaccgtaggcaattttcaaactgtgtacttagtttggcttttctgagttgtttgatttactttgttataaccgtcattatcattcagcaaattattgaggagcgtttgacaagcagtgttgtccaaaatgacattgcaatctattatttgtttcgtcagatgagtttgtgcatattaatatttctggcattggtgaataaagttagtgaaaacacaaaacagcgcaatttattttccaaaaaaatgactttgtgcataagtttgttttttgtttttggggggccgatagttgctcacatactttctagtcattatgagagctacaatttacacattgccgagttaaccaatgaaaatggtcaggtggtttggaaagcctcatatgttaccataatgattttcatgtggttagactggccccctgaatctccagacaaccaatatcacttaaataagtgatagtcttaatactagtttttagactagtcattggagaacagatgattgatgtcttagggccggagaaacgcagacggcgtaccacacaggaaaagatcgcaattgttcagcagagctttgaaccggggatgacggtctccctcgttgcccggcaacatggtgtagcagccagccagttatttctctggcgtaagcaataccaggaaggaagtcttactgctgtcgccgccggagaacaggttgttcctgcctctgaacttgctgccgccatgaagcagattaaagaactccagcgcctgctcggcaagaaaacgatggaaaatgaactcctcaaagaagccgttgaatatggacgggcaaaaaagtggatagcgcacgcgcccttattgcccggggatggggagtaagcttagtcagccgttgtctccgggtgtcgcgtgcgcagttgcacgtcattctcagacgaaccgatgactggatggatggccgccgcagtcgtcacactgatgatacggatgtgcttctccgtatacaccatgttatcggagagctgccaacgtatggttatcgtcgggtatgggcgctgcttcgcagacaggcagaacttgatggtatgcctgcgatcaatgccaaacgtgtttaccggatcatgcgccagaatgcgctgttgcttgagcgaaaacctgctgtaccgccatcgaaacgggcacatacaggcagagtggccgtgaaagaaagcaatcagcgatggtgctctgacgggttcgagttctgctgtgataacggagagagactgcgtgtcacgttcgcgctggactgctgtgatcgtgaggcactgcactgggcggtcactaccggcggcttcaacagtgaaacagtacaggacgtcatgctgggagcggtggaacgccgcttcggcaacgatcttccgtcgtctccagtggagtggctgacggataatggttcatgctaccgggctaatgaaacacgccagttcgcccggatgttgggacttgaaccgaagaacacggcggtgcggagtccggagagtaacggaatagcagagagcttcgtgaaaacgataaagcgtgactacatcagtatcatgcccaaaccagacgggttaacggcagcaaagaaccttgcagaggcgttcgagcattataacgaatggcatccgcatagtgcgctgggttatcgctcgccacgggaatatctgcggcagcgggcttgtaatgggttaagtgataacagatgtctggaaatataggggcaaatccagtggttaaccttgctttcggttaatctatactttaatggtttacgctatgatatctggaatggagtgacggtgattgctttttgtgccgtactgtacaatatctctctgttatttatgagcaggtatagcgtgtccacttggtatattagtcgcactattgaagtagtcagtaagttaaccgttatggtaatatttatgtgccatatattcagtgcgctacgagtaacaaagaacattgcacatcgcgatcccttaaccaatatatttaacagaaattatttttttaatgaactgacagttcaatcagcatcagcccaaaaaacgccttattgcgtcatgattatggatatcgaccacttcaaaaaagtcaacgacacctgggggcatccggttggcgatcaggtgataaaaacagtggtgaatatcattgggaaaagcatacgaccagatgaccttttagcgcgcgtcggcggcgaagagtttggcgtcttgctgacggacatcgatactgaacgtgcgaaagctttagcggaaaggattcgggaaaatgttgagcgtttaactggcgataatcctgaatacgctataccacaaaaagtgacgattagtattggcgctgttgtgactcaggaaaatgcgttaaacccaaatgagatctatcgactggctgataacgcactttacgaggcgaaagagaccgggcgtaataaggtggttgtgagggatgtggtgaatttttgtgagtcaccataaagcggcattttgatcctacccacgtaatatggacacaggcctaagcgaggttcttgttttcaaattgttccggactgaggccgccacaccaactgtgccgccgccaccgattgtaatcacattcgatataattaaacaccgttgcccgcattatttcccggctgataaagtgttctccatggatacattccactttcagcgaatgaaagaagctttccacgcaggcattatcgtagcagcaaccttttgcgctcatacttccacgcagattatgccgcttcagttgcgcctgataatctgctgaacagtactggcctccacggtccgtgtgaacgataacgttccggggcctcttacgccgccacagcgccatctgcagggcatcgcaggccagttgcgccgtcatgcgtggcgacattgaccagccaataacggcacgtgaccacaggtcaatgaccactgccagatacagccagccttcatctgtacgtaagtacgtgatgtctcctgcccacttctggttcgggccactggcgtaaaaatcctgctccaacagattttctgacacaggcaggccgtgtgcgcggtagctgaccgggctgaacttccgggaggcctttgccctcagtccctgacggcgcaggcttgccgccacggtttttacgttaaaggggtaaccctgagcacgcagttcatccgtcaggcgtggggcaccgtaacgctgttttgaccgggtaaaagccgcgaggacaacgctgtcgcagtgttggcggaactgctgacgcgtgcttatccttgtccgccgctgacaccacgtataccagccgctgcgggccacccggagcacgcggcacattgctttgatgctgaactcagcctgatgtttttcaataaagacatacttcatttcaggcgcttcgcgaagtatgtcgcggccttttggaggatagccagctcttcatcccgttctgccagctggcgtttgagacgtgcaatctcggtagacatctccagttcacgttcagaagacgtctgctgattttgctgtttactgcgccagttgtagagttgtgattcatacaggctgagttcacgggctgcggcagtaacaccgatgcgttcagcaagcttcagggcttcactgcgaaattcaggcgaatgctgtttacggggttttttactggttgatactgtttttgtcatgtgagtcacctctgactgagagtttactcacttagccgcgtgtccactattgctgggtaagatcagtgcctggcacacgcgtttgatggaagacggcgttcaggcaatgcgcgattatcttgccggactggatatcgcttcgccagagcatcaggttctgatgaacgtaacagcaaaaagcgaggtcgctccgtcaattatcaaagaaaatctctcattacacttaactcatacggtgaaatggactgaatctctcgatacatttctgaatatgccaaccccggtagctttccttgaaataagtaataagccctatttggggaatatgttaaatgattttgctggcgtggatcagcaacgagttatgcattgtcgtaaagcatttagtgatgcaaaggtattcaaatgattcctgattatttaacttttattcgctttcaggataaacgaaatctgatatacatttatgctattggacttattctgataggcttttattggaagaatgcagggtttacttttccatcagaggatattggtgtagttagtgggattctggctctggtgctgtataattttatttttgatctcaaggcgtactgggcttataaatgcgtcacgaagaatatcgatttttcgtggtttaagaaaaagcagaaccacaaaatagaattatttcttacacaacctctggtggcaggatttctgtcgttaatcatgttgagtgcaatgagttgggggctataccagcttctaccctcgttatatgcgctgttcctgatttcgttacttgggccgttggtcatctttctgctgtttcggatgatccgcaccagttatgtcaagcaggtcgctatttcagtagcgaaaaaagtaaaatataaaagtctgactcgctatgtgctgctttcggtgtgcatctcaacggttgttaacctgcttactatcagcccgttgcgtaacagtgattcttttgtgacagaggggcagtggttaacgtttaaatcgataattgcattgctcattctttgtggcgtagtgttggcgattaatctgttttttctgcgcttctccaagcggtacgcttttctgggcaggctttttttgcaggaaatcgatctgtttttctccagtgaaaatgcgttgtcgaccttttttgccaagccgctttggcttcggttattcatattgctggttattgaagtgatgtggattacgctggtgtcggtattggcaacgcttgtagaatggcggatttggtttgaagcctattttttactctgctatgtaccgtgcttaatttactattttttctattgtcgattcctctggcataacgattttatgatggcatgtgacatgtatttccgttgggggcattttaataagtgaggaagtgataggaagtgaccagataatacatatatgttctgtactctcttgcgcattttgattgttgactgagtaaccagacagttgatgtgcacgatttcccctcgccctaacagacgtgggcgggggcacccggtgtgtgcaatatacgaaaaaaaagcccgtactttcgtacgagctcttctttaaatatggcggtgagggggggattgactcgcttcgctcgccctgcgggcagcccgctcactgcgttcacggtctgtccaactggctgtcgccagttgtcgacccccggtcggggcttctcatccccccggtgtgtgcaatacacgaaaaaaaagcccgtactttcgtacgagctcttctttaaatatggcggtgagggggggattgactcgcttcgctcgccctgcgggcagcccgctcactgcgttcacggtctgtccaactggctgtcgccagttgtcgaaccccggtcggggcttctcatccccccggtgtgtgcaatatacgaaaaaaaagcccgtactttcgtacgagctcttctttaaatatggcggtgagggggggattgactcgcttcgctcgccctgcgggcagcccgctcactgcgttcacggtctgtccaactggctgtcgccagttgtcgaaccccggtcggggcttctcatccccccggtgtgtgcaatatacgaaaaaaaagcccgtactttcgtacgagctcttctttaaatatggcggtgagggggggattgactcgcttcgctcgccctgcgggcagcccgctcactgcgttcacggtctgtccaactggctgtcgccagttgtcgaaccccggtcggggcttctcatccccccggtgtgtgcaatatacgaaaaaaaagcccgtactttcgtacgagctcttctttaaatatggcggtgagggggggattcgaacccccgatacgttgccgtatacacactttccaggcgtgctccttcagccactcggacacctcaccaaattgtcgttcctgtcttgctggaacgggcgctaatttagggaaatcatgacctgaggtcaacaaactttttgaaaaaatcgcgcgtttattcaaacttcaatcaatgtgtggttttaataagcgaaatctgctttttttgccaccgaccacggatttgttatgctggtggcctttgtagatcataacgataagtgcgaataaatttcgcacaacgcttttcgggagtcagtatggatatcatcttttatcacccaacgttcgatacccaatggtggattgaggcactgcgcaaagctattcctcaggcaagagtcagagcatggaaaagcggagataatgactctgctgattatgctttagtctggcatcctcctgttgaaatgctggcagggcgcgatcttaaagcggtgttcgcactcggggccggtgttgattctattttgagcaagctacaggcacaccctgaaatgctgaacccttctgttccactttttcgcctggaagataccggtatgggcgagcaaatgcaggaatatgctgtcagtcaggtgctgcattggtttcgacgttttgacgattatcgcatccagcaaaatagttcgcattggcaaccgctgcctgaatatcatcgggaagattttaccatcggcattttgggcgcaggcgtactgggcagtaaagttgctcagagtctgcaaacctggcgctttccgctgcgttgctggagtcgaacccgtaaatcgtggcctggcgtgcaaagctttgccggacgggaagaactgtctgcatttctgagccaatgtcgggtattgattaatttgttaccgaatacccctgaaaccgtcggcattattaatcaacaattactcgaaaaattaccggatggcgcgtatctcctcaacctggcgcgtggtgttcatgttgtggaagatgacctgctcgcggcgctggatagcggcaaagttaaaggcgcaatgttggatgtttttaatcgtgaacccttaccgcctgaaagtccgctctggcaacatccacgcgtgacgataacaccacatgtcgccgcgattacccgtcccgctgaagctgtggagtacatttctcgcaccattgcccagctcgaaaaaggggagagggtctgcgggcaagtcgaccgcgcacgcggctactaataaagcatcaggattcctgctatccttggcgggaattgaatacaggagagagttatgtatcccgtcgaccttcatatgcataccgttgccagcacacatgcatatagcacattaagtgattacattgcccaggccaaacaaaagggcattaaactttttgcgatcaccgatcatggcccggatatggaagatgcgccgcatcactggcacttcattaacatgcgtatctggccgcgagtggttgatggggtagggatcctgcgcggcatcgaagctaacattaaaaatgttgatggtgaaattgactgcagcggtaaaatgtttgactcgctggatctaattattgccggttttcatgagccggtttttgcgccacatgacaaagcgaccaatacacaagcgatgatcgccactatcgccagcggcaatgtgcatataataagccatcccggaaatcccaaatatgaaatagatgtgaaagccgttgctgaagcagccgcgaaacatcaggtggcgctggaaatcaataattcctcatttttacactcacgtaagggcagtgaagacaactgtcgtgaggtagccgcagcggtacgtgatgctggaggttgggtggcattaggctcggattctcacaccgcgtttaccatgggggaatttgaagagtgtcttaaaatcctcgacgcggtagattttccgccagagcgcattttgaatgtttctccgcgccgcttactgaacttccttgaatctcgcggtatggcaccgattgcggaatttgcagacctttaattactagtaatggaaatatattaatgaacgagttttctatcctctgtcgtgtgctgggttcgctctattaccgccaaccacaagatcctttactggtgccgctgtttaccctgattcgtgaggggaaactggctgcgaactggccactggagcaggatgagttgctgacacgtttgcagaaaagctgtgatatgacgcaagtctctgccgattacaatgcgttgtttatcggcgatgaatgtgctgtgccgccatatcgtagcgcatgggttgagggcgcgacggaagcggaagtgcgcgcttttctttctgagcgagggatgccattagcggatacgccagccgatcacatcggcacattgctgctcgcagcttcctggctggaagatcagtcaacggaagatgagagcgaagcactggaaacactgttcagtgagtatctgttaccctggtatggtgcgttccttggcaaagtggaggcccatgcaaccacgcctttctggcgcaccatggcaccgctaacccgcgatgccattagtgcaatgtgggacgagctggaagaagattctgaagaataagtgtgatctacgtcactcataactgcaacggataatttgttgttgcataaaatgtgtgctcgatctcattcatggccgcgttttctgctatcatgcgcggcatgaacatacttctctctattgcaatcacaacaggcattctctccggtatctggggatgggtggctgtttccctgggcttactaagctgggcgggcttcctgggctgtacggcctactttgcctgcccgcaaggtgggctgaaagggctggcgatctccgctgcaaccctgcttagtggcgtggtgtgggcgatggtcattatttacggtagtgcactggcaccacatctggaaattctcggttatgtcataaccggtattgtcgcgtttctgatgtgtattcaggccaaacagctgctgctttcatttgttccggggacgtttataggcgcatgcgcgacgtttgccgggcagggtgactggaaactggtgttaccttcgctggcgcttgggctgatatttggttacgcaatgaaaaacagtggcctgtggctggcggcgcgtagtgcaaagacggcgcaccgtgagcaggaaatcaaaaataaagcgtgaggggcactcacgctttcgcttaaacagtaaaatgccggatgataattccggcttttttatctgtcaggattccggtggaaccgacatatggcggtatttcaccagaatgtcattctgccgttctgctttattttgcaaatcccacagaccacggtcgataccatcattaatcaggaaaatgacccctgtttcgatagccgacatcaggcacagcataacaggttcgttcgaggtgtaacccacttccccttcaagcaagcgctggtagtcaataaagcggaaaaccccggcctgaacttcataggaaagtatcgtcttactggtgttcaccgaagaaaggatctcgccggtactcacattgacgacgcgcaggttcacggcaatctgatcgagctggtattgcgtgtcggcaccgatgccaaaatatcttgccccaaccccgccagatttgacgttgctttcataaccgataatcgaaccttcaaccatgatatttgccgccgttaaagattgcagcgggattcggttattaatggcaaccgtgccgttttcttgtgccgcacgaataatcttgcgctcgttaagcaggttttgtaagccctggcgctccagcggtataaaccagcgagaatctttcagtgccgtgaccagcattgccgtggcgctttgcggaacagcagtggagaagttacttgccgggtagggtttaaattgcccggtttcgtcctgaatgttgtataccgaaacaaagattttacccgtcggcgctggcagatgggtcaaatctttgtagctctgagcacgaggcattaatgtcggtctggcggcttctttaggcggggcggttaagcatccgctcagtaacatgacggcaaccaaaagaaataagcgctgcatgattattttccttatgaagctggggcttaaaaatcggttgagttattttgtaaacccgaaacctggatggtcgaggtttgtccggttttacgatctgtcacgttcaactgcaattgaccatcgcggttggcaatatcgacaatataatcgttggtcaccatgcggcccggtttaccggtattaatattcgacagtagcccacctaaaatttgtgactggatggcctgagtaaagttatctaacgctgagggtgtttcaataccaaagtcatcgttatagctcggatctttataagagttttgggcctgagcgctatttaataaaaaagcgccattatttgggttaccaccaaagtttggattacggaactggaaagtcatggttccagcccaacttaatggcgaaataagcatgagtagaactactgcatgtttgacacgcattgcagcctccgaacaattttttatttagaattcatcatgcgccaaatcgcccgtacttaataacgcctgatttatctggcgacgatttagtgcttcttcagtttgaatcagtgcaaagacgacagttttctcgaagtctcttttcaacggaaataaaaaagtctggaaaataacgtcctgattgaccgttatagtgatccagcttccccatcgtgcactgggcctttcattaatcgttaagttacccgtatagtcactttcccatttatcactaaaggctcggtaaaaatcatggccaatagatgaaacagtatggtcagttagcaatcccgggacttctacctcaacggcgtgaagattccctgcggcgaacagaaattctgccgccacaatccagcgtaaataacgtttcatggctttatcgcctgaggttatcgtttgcccaggaaaccgcttgtgtccggttttttacggctatcttcttgaaaagattataaagatgcgttttaaccgtattttcgctgatgaacaacgaacgagcgatctcgttattagacgcgccgatacgcagcttattcaggatctctttttcccgatgagtaaggagggctgattccgtgctgttataacgatagttacctgaatgcgtaatcaggtagctggcaagcttttgcgtaaagtagcattcgccgcgcaggacgccttgcaacccattgacaacacgttcttgatcctccatggaataaaaaacgccgttgatatgaggccagttttcaatgtcgcggtacgggtaatcttcaggcgtatttagcaacaatattttgatattgttgtttttcctgctcaaagtatcctgccaataatggataagctttttatccgcttccatcatatccagaagaataatagagcctgaagagatatcgtccagagaacgttgaatattatgtaattttcctgtaattgccagcgattgtttaaggtgctgcaagagagctgtcgcctgcaaagaagatttagtgatcaacaataatgtatgaccatgaatactatggacttcattaaacatgatgaaaccccgctttttttattgatcgcacacctgacagctgcctctaaaatagaagcaccagaagtactgacagatgttgcactgctgtgtgtagtaataaatcagccctaaatgggtaaaatataaaactaatggattacatctgatttcaatctagccattacaaatcttaaatcaagtgttaaacatgtaactaaatgtaactcgttatattaaaatgttaaccttaaggttttattaagtttagaaatgatagaaaagttgtacatttggtttttattgcacaattttaaaaaatcatacaaatggtgataacttactaataatgcatataaaaaatatttcggtgtagtcctttcgtcatgtaaaacgttcttgttttttctccacacctccgtggacaattttttactgcaaaaagacgaggtttgtcacggcttgtgcgcaagacatatcgcagcaatcagcgacgggcaagaagaatgactgtctggtgctttttgatagcggaaaacggagatttaaaagaaaacaaaatatttttttgcgtagataacagcgtatttacgtgggttttaatactttggtatgaactaaaaaagaaaaatacaacgcgcgggtgagttattaaaaatatttccgcagacatactttccatcgtaacgcagcgttaacaaaatacaggttgcgttaacaaccaagttgaaatgatttaatttcttaaatgtacgaccaggtccagggtgacaacatgaaaaacaaattgttatttatgatgttaacaatactgggtgcgcctgggattgcagccgcagcaggttatgatttagctaattcagaatataacttcgcggtaaatgaattgagtaagtcttcatttaatcaggcagccataattggtcaagctgggactaataatagtgctcagttacggcagggaggctcaaaacttttggcggttgttgcgcaagaaggtagtagcaaccgggcaaagattgaccagacaggagattataaccttgcatatattgatcaggcgggcagtgccaacgatgccagtatttcgcaaggtgcttatggtaatactgcgatgattatccagaaaggttctggtaataaagcaaatattacacagtatggtactcaaaaaacggcaattgtagtgcagagacagtcgcaaatggctattcgcgtgacacaacgttaatttccattcgacttttaaatcaatccgatgggggttttacatgaaacttttaaaagtagcagcaattgcagcaatcgtattctccggtagcgctctggcaggtgttgttcctcagtacggcggcggcggtaaccacggtggtggcggtaataatagcggcccaaattctgagctgaacatttaccagtacggtggcggtaactctgcacttgctctgcaaactgatgcccgtaactctgacttgactattacccagcatggcggcggtaatggtgcagatgttggtcagggctcagatgacagctcaatcgatctgacccaacgtggcttcggtaacagcgctactcttgatcagtggaacggcaaaaattctgaaatgacggttaaacagttcggtggtggcaacggtgctgcagttgaccagactgcatctaactcctccgtcaacgtgactcaggttggctttggtaacaacgcgaccgctcatcagtactaatacatcatttgtattacagaaacagggcgcaagccctgttttttttcgggagaagaatatgaatacgttattactccttgcggcactttccagtcagataacctttaatacgacccagcaaggggatgtgtataccattattcctgaagtcactcttactcaatcttgtctgtgcagagtacaaatattgtccctgcgcgaaggcagttcagggcaaagtcagacgaagcaagaaaagaccctttcattgcctgctaatcaacccattgctttgacgaagttgagtttaaatatttccccggacgatcgggtgaaaatagttgttactgtttctgatggacagtcacttcatttatcacaacaatggccgccctcttcagaaaagtcttaatttgttgaaatatcgagcataagatgaatctggagagaatggtctgctgcgaatcagccaacctgaaagtatggataacacaaccctcaaggatgactaatcattgaggaaatagaataaatgttcagaccttttttaaactctcttatgctcggcagtttgttttttccttttattgccattgctggaagcaccgtgcaagggggcgtgatccatttttatggccaaattgtggaaccggcatgtgacgtcagcacccagtcatcacccgtagaaatgaactgcccacagaatggttctattccgggcaaaacctactccagcaaagcgttaatgagcggcaatgtcaaaaacgcgcaaatagcctcagtaaaagtgcagtatcttgataaacagaaaaagctggctgtaatgaacatcgaatataactaagtttctgaacaactcacgttgctgagcagaaaaatgcgatttaaccaaaaagcctgctgtacacttaagaaacaagaaggtgtaaggaggcgttatgaaaacgcgtattcatgttgtgcagggtgatattaccaaactggccgttgatgtgattgtgaatgcggctaatccgtcattaatgggaggcggcggcgtcgatggggccattcatcgcgcagcgggtccggccctgctggatgcttgtttaaaagtcaggcaacagcagggcgattgccctacggggcatgccgttattacgcttgcaggcgatcttcccgctaaagccgtagtgcacaccgtcgggccagtctggcgtggtggtgaacaaaacgaagaccagcttttgcaggatgcctatctcaatagcctacgactggtggcggcaaacagctatacgtcagtggcttttcctgcaatcagtactggggtttatggttaccctcgtgcggcagcggctgaaatcgcagtaaaaaccgtttcagaatttattacccgtcacgctttacccgaacaggtatactttgtctgttatgatgaagaaaacgcccacctctacgaaagactccttacccaacaaggagatgaatgatttgccccggctggcgagcgcggtgctgccactgtgttcgcaacatcccggtcagtgtggcctttttcctctggagaaaagtctggatgcgtttgccgcccggtatcgtctggccgaaatggcagagcatacgctcgatgttcagtattacatctggcaggacgatatgtcgggtcggttactgttttccgccctgttagccgcagcaaagcgtggcgttcgcgtccgtttgttgctggacgacaacaatacgcccggacttgacgacattttacgcttgcttgacagtcatccacgcattgaagtccggctttttaatcctttctcgtttcgcttgctgcgtccgcttggttatatcaccgacttttcccgtcttaatcgccgtatgcacaataaaagtttcactgtcgatggcgtggtgaccctggtgggaggacgaaatattggtgatgcctattttggagcaggggaggagccacttttttcggatttagatgtcatggcaataggacccgtggtagaggacgttgccgatgatttcgcccgctactggtattgcaaatcggtttcacccttacagcaggtgctggatgtcccggagggtgaaatggcggatcgcatcgagttacccgcctcctggcataacgatgccatgacgcatcgttatttacgcaaaatggaatccagtccatttataaatcatctggttgatggaacattgccgcttatctgggcgaagacacgtttattaagtgatgatccggcgaaaggggagggcaaggcaaaacggcattcactgttaccgcagcgcctgttcgatatcatgggctcacccagtgaacgcatcgatattatctcttcctattttgtaccgacacgcgcaggtgtggcgcaactcttacggatggtgagaaaaggggtaaagattgcgatcctaaccaattctcttgccgctaacgatgttgctgtcgtccatgccggatacgcgcgctggcgcaaaaaattgctccgctatggcgtggaattatatgaactcaagccgacgcgtgaacaaagtagtacgttacacgatcgcggcataaccggtaattccggagccagcctgcatgctaaaacctttagcatcgatggtaaaacggtgtttatcggctctttcaatttcgatccgcgttcaacattgctcaatactgaaatgggcttcgtgatagagagcgaaacgctggcacagttaattgataaacgctttattcagagccagtatgatgcggcctggcagctccgtctggacaggtggggacggatcaactgggttgatcgtcatgcaaagaaagagattattctcaaaaaagaacccgccaccagtttctggaagcgggttatggtcagactggcgtcgatattgcccgtggaatggttattgtaaatgtggcttaacgggctggtgctttatcgttctcacgcttaacaaccggtttaccagagaacaaaaacttcagtaacgggatgcgcaaatgaatttcatacagaattatcgcaatccctactacaaatatcaggccacagagaaaaccaagccagttggaggtgatgtgcggtgtaatgtatgcgccgaaaaacagcgttaacgggtggtgaaccagatagataaacagcgatgcgttaacaaaataagtcacccgcgctgactggaagttaagcaaacggtggccaaaggagaagaccacattcaccatccacagaccgaggaccatggtgatcaccgactcggtttcgtacatccaggcatcgccactgccatagcgctggttgagtaaataagcgacaaacgccaatgctgctgcaagggtacagccacgagacggcgtggtaaacaaggctttaagatgagggaaaatgaaagccagtgcgccgaggataaagaacggcaaataaaacagcgtttgcatgacaataaaattgaacatgccattactcagaatgggcggatacacaataaaaatcgttcttcttattaccgcataaccgatgccgaggcataaaaaaatcaccgatagttttaccatcgagaattttttattcgttttatcagaattttctaaattatttctgatgcgcttaaatatccatacgcacagcgtcgtcatgaccactaacaccagtaaaaaccacaggtgtgatattaattcccaggccaacgtattatatttgtcatacaatgacagcccaggccaactttccgcttttcctttgacatattgcagcataataaattgcggtaatgtcagtagggggatggctgttaacatcgggatacctacacgttcgacacgtactttccaccattttttcaagggatagcgtaaaaaaagcatgtaggaaaagtagccggatataacgaaaaatacctgcatgcggaacgagtggatgaagtcattaaaaagggtcagccacaatgatgattcggcgctattcacatgccatgtatggctcgaatagattaaagaaatatgaaaaggtatccctaacaacatcagccaggcgcggatggagtcgaggaaatattcacgttgcgcgggtactgggttcatatatggttaactaatctcggatttttcgtcttatccctgtcgggttatgcctttaggcttgttgccatagtgacaccgacctgaccgcgccaggcgcaggcttcaaggtttttatgcatagcatcatcgctaccactaaccagaatggaagcgtctgtaagacggttgataaataaatttgctggcaaaccctacacgaagtcgatgcttctgtctttaggagaagcacggaaagtgaaaacggttgcaatcaggtgcttaatccatgagccagcgtgctgaacgataccgggattctgttgtcggaatggctggttatccattaaaatagatcggatcgatataagcacacaaagggggaagtgcttactaattatgaaacataaactacaaatgatgaaaatgcgttggttgagtgctgcagtaatgttaaccctgtatacatcttcaagctgggctttcagtattgatgatgtcgcaaagcaagctcaatctttagccgggaaaggctacgagacgcccaaaagcaacttgccctccgttttccgcgatatgaaatacgcggactatcagcagatccagtttaatcatgacaaagcgtactggaacaatctgaagaccccattcaaactcgagttctaccatcagggtatgtacttcgataccccggtcaaaataaatgaagtgactgccaccgcagtcaaacgaatcaaatacagcccggattatttcactttcggcgatgttcagcatgacaaagatacggtaaaagaccttggctttgccggttttaaagtgctttacccgatcaacagcaaagataaaaacgatgaaatcgtcagcatgctcggggccagctatttccgcgtgattggtgcaggtcaggtttatggcctttctgcccgcggcctggcaattgataccgccttgccatcgggtgaagaatttccgcgcttcaaagagttctggatcgagcgtccaaaaccgactgataaacgtttaaccatctatgcattgcttgactcgccgcgtgcgacaggtgcttacaaattcgtggttatgccagggcgtgacacggttgtggatgtgcagtcgaaaatctatctgcgcgataaagtcggcaaactgggggttgcaccgttaaccagtatgttcctgtttgggccgaaccaaccgtcgcctgcaaataactatcgtccggagttgcacgactctaacggtctctctatccatgccggtaatggcgaatggatctggcgtccgttgaataacccgaaacatttagcggtcagcagcttctccatggaaaacccgcaaggctttggtctgttgcagcgcggtcgtgatttctcccgctttgaagatctcgatgatcgttacgatctccgtccaagcgcatgggtgactccgaaaggggagtggggtaaaggcagcgttgagctggtggaaattccaaccaacgatgaaaccaacgataacatcgtcgcttactggacgccggatcagctgccggagccgggtaaagagatgaactttaaatacaccatcaccttcagccgtgatgaagacaaactgcatgcgccagataacgcatgggtgcaacaaacgcgtcgttcaacgggggatgtgaagcagtcgaacctgattcgccagcctgacggtactatcgcctttgtggtcgattttaccggcgcagagatgaaaaaactgccagaggataccccggtcacagcgcaaaccagcattggtgataatggtgagatagttgaaagcacggtgcgctataacccggttaccaaaggctggcgtctggtgatgcgtgtgaaagtgaaagatgccaagaaaaccactgaaatgcgtgctgcgctggtgaatgccgatcagacgttgagtgaaacctggagctaccagttacctgccaatgaataagacaactgagtacattgacgcaatgcccatcgccgcaagcgagaaagcggcattgccgaagactgatatccgcgccgttcatcaggcgctggatgccgaacaccgcacctgggcgcgggaggatgattccccgcaaggctcggtaaaggcgcgtctggaacaagcctggccagattcacttgctgatggacagttaattaaagacgacgaagggcgcgatcagctgaaggcgatgccagaagcaaaacgctcctcgatgtttcccgacccgtggcgtaccaacccggtaggccgtttctgggatcgcctgcgtggacgcgatgtcacgccgcgctatctggctcgtttgaccaaagaagagcaggagagcgagcaaaagtggcgtaccgtcggtaccatccgccgttacattctgttgatcctgacgctcgcgcaaactgtcgtcgcgacctggtatatgaagaccattcttccttatcagggttgggcgctgattaatcctatggatatggttggtcaggatttgtgggtttcctttatgcagcttctgccttatatgctgcaaaccggtatcctgatcctctttgcggtactgttctgttgggtgtccgccggattctggacggcgttaatgggcttcctgcaactgcttattggtcgcgataaatacagtatatctgcgtcaacagttggcgatgaaccattaaacccggagcatcgcacggcgttgatcatgcctatctgtaacgaagacgtgaaccgtgtttttgctggcctgcgtgcaacgtgggaatcagtaaaagccaccgggaatgccaaacactttgatgtctacattcttagtgacagttataacttggatatctgcgtcgcagagcaaaaagcctggatggagcttatcgctgaagtcggtggcgaaggtcagattttctatcgccgccgccgtcgccgcgtgaagcgtaaaagcggtaatatcgatgacttctgccgtcgctggggcagccagtacagctacatggtggtgctggatgctgactcggtaatgaccggtgattgtttgtgcgggctggtgcgcctgatggaagccaacccgaacgccgggatcattcagtcgtcgccgaaagcgtccggtatggatacgctgtatgcgcgctgtcagcagttcgcgacccgcgtgtatgggccactgtttacagccggtttgcacttctggcaacttggcgagtcgcactactggggacataacgcgattatccgcgtgaaaccgtttatcgagcactgcgcactggctccgctgccgggcgaaggttcctttgccggttcaatcctgtcacatgacttcgtggaagcggcgttgatgcgccgtgcaggttggggggtctggattgcttacgatctcccgggttcttatgaagaattgccgcctaacttgcttgatgagctaaaacgtgaccgccgatggtgccacggtaacctgatgaacttccgtctgttcctggtgaagggtatgcacccggttcaccgtgcggtgttcctgacgggcgtgatgtcttatctctccgctccgctgtggtttatgttcctcgcgctctctactgcattgcaggtagtgcatgcgttgaccgaaccgcaatacttcctgcaaccacggcagttgttcccagtgtggccgcagtggcgtcctgagctggcgattgcactttttgcttcgaccatggtgctgttgttcctgccgaagttattgagcattttgcttatctggtgcaaaggaacgaaagaatacggcggcttctggcgcgttacattatcgttgctgctggaagtgcttttttccgtgctgctggctccggtacgcatgctgttccatacggtcttcgttgtcagcgcgttccttggctgggaagtggtgtggaattcaccgcagcgtgatgatgactccacttcctggggtgaagcgttcaaacgccacggctcacagctgctgttagggttagtgtgggctgttgggatggcgtggctggatctgcgtttcctgttctggctggcaccgattgtcttctcgttgatcctgtcaccgtttgtttcggtgatttccagccgtgccaccgttggtctgcgcaccaaacgctggaaactgttcctgatcccggaagagtattcgccgccgcaggtgctggttgataccgatcggttccttgagatgaatcgtcaacgctcccttgatgatggctttatgcacgcagtgtttaacccgtcatttaacgctctggcaaccgcaatggcgaccgcgcgtcaccgcgccagtaaggtgctggaaatcgcccgtgaccgccacgttgaacaggcgctgaacgagacgccagagaagctgaatcgcgatcgtcgcctggtgctgctaagcgatccggtgacgatggcccgtctgcatttccgtgtctggaattccccggagagatattcttcatgggtgagttattacgaagggataaagctcaatccactggcattgcgtaaaccggatgcggcttcgcaataaaaacgtagttgcctgatgcgctacgcttatcaggcctacatcgttcctgcaatttattgattttgcaagactttgtgggtcggataaggcgttcacgccgcatccggcaaaaacaacgagccaataaaaataccggcgttatgccggtatttttttacgaaagaggtatcaaatgcgtttaattgtggtgagcatcatggtgaccttgctgagtggctgtggcagcattattagtcgcactataccggggcaggggcatggcaaccaatattatcccggtgtgcaatgggatgtgcgtgactccgcctggcgttatgtcacgatccttgatctgccattctctctggtttttgatactttactgctgccgatcgacattcatcatggcccgtatgagtgattaacgttcatcccactcatcagctgctgcgcgtccttcctcggtatccagcggtggctcaagctgaaattccccctcgtcccattcatgtaatgtattctcttcctgccactcctggcgtatctctatctcatcatagtcgccatcaaaaacactttgcgcggcttcaccgctaagcataggtaaacattcaccttcttccccttcgtcggcaaaaaactcaacttgccacatgatgtcgccgtcctgcaaaacgtatttttgggcattgaactgttgcacattcgcatcttcggcgtcgatgccggggttgtctgcaagaaattcttcgcgtgcagcgtcaatggcttcttcaagcgttgcgtacatggtcatcacgattctccctttgagttgatgaggtttcagggaaaaggatagctgattctccgcttttgcaagtatgaaaggcgaaaaatcagttcgatacctggggtattcgacgacgacgtagactgttccatgaatagactgcgttgaataacactacgccagcggtgacgagaaataccgctctgaaaccgtagttcgctgaaatcgctgctcccatcaatggtccggtaacgttgccaatatcacgaaacgattggttatagctgaagatacgcccggcgatctggttgctcgagttgtaaaccaacagtgtctgtacggcggggagtagtgcaccatcggcggcaccgagcaaaaaacgtaaaatcccaagttgcaatggcgtctgaacgtaagacattgggatcaacagcagtacagaaaagatcagcgctgtaatcaggatcttttcgggtccgattcgatcgccaagtttgccgagtcgtggtgcacttagcagagccgccacgcctggcaccgaggcgatcatgccactgataaaggcgacgttactgacgttacccgccagttcgcggacatacagcgtcagaatgggggcaattgagcccgtcgccacctggatgattaacgtagtgacaaacaggctgagtaccagtttcgggtttttaagtgatgtcaccacttcccgcatgtgcagcatctcttttttgctgaccggctggaatttttctctgatgcaaaacagggtgacgaaaaagcagagtatgagcacactggcggtaataaagaataccggacgtaagccgtagctatcggcgagcaggccgccagccattgggccgagcaacgcaccactaacgccgcctgtggagagcgtacccagcgcccagccgcttttattacgcggtacttgtgtggcgataagagcattagcgttggggacaaatccgccaagtaacccaagaagcgcccgcaggatcaaaaactgccagatattttgtgccagccccatcaacaccatcacgatgcccatgccgagggcagagcgtaatagcatgagttttcggcctttacggtcggcgagtccaccccaaaacggtgaggcgatggccgaaaataaaaatgtaatgctgaagacaataccggaccacatattcagggcggagtgaccggtaacgccaagctgctcaacgtagaggggtaagaagggcattaccagactgaaggcggcaccggtaagaaaacagcctagccaggcgacgatcaggtttcgtttccagtttataggggtgtcattttcacagggtgacatagcaatccgctgttggtgcgccaggcgcggtgaacataagaagaaaagataagcacactaattatgcgcccgacttccagggggcgcaatccagagagcttttatcgctaaatcagggggatttgctgtggtaatgccggatgccattctgaagcatccggcatgggagatttaatagcgtgaaggaacgccttccgggcgtgttttaaagcgacggtgtaaccacatatactgctctggtgccatcatgatgcatttttcgaccactttgttcatccacgcggcggtagtttcggcatcatccagtggcggagaacactctggcggcagcataatcaattgataccctttgccatctggcttacggcgtggaacgaagggcaccagacatgcgccggacatccgtgccagcatccaggttccggtcgtggtcgcagcctgctcaacggcaaacaacgggacgaaaacgcttgagcgcgggccgtaatcatgatccggtgcgtaccagaccacttcgccttttttcagggctttaatcatgccttttaaatctttgcggtcgagcatcgatttatttgagcgcaaacggccccaggtttgtagccagtcaatcagtggattatcgttcgggcgataaacgccaatacccggttcctgcataccaaactgccgcgcacccagctccagtgtcagaaaatggatgccaactaacaggatgccgcgtttttgcgcctgcacgtcacgaatgtgttccatgccgatcacttccgtccagcgggcgattcggcggtccggccagaaccacgccatgccggtttccatcaggcccatgccaacggattcgaaattcttcaccaccattttacggcgttcttgttcgctcatttccgggaagcacagttccaggttgcgatgcacaatttttgcgcgtcgtttcataaaacgtaacgccagttttcctaatccacaaccgaggcggtagataaccgggtagggcaattgcacgactaaccaaagtacgccaatacccaaccaggttaaccaataacgcggatgaagcagtgcggtggagaacttgggtagattcgtcatatcaatcctgtttttcaacctattcgggcaattgtatgtattgtcgcattttttcgcccgcaaccaaaatttgtggctgaagactgggcgaaattgccgcgcttgtaaataacaaataatttttaatgcgcaaatgtagcgtaaaatgtgtggatgttaattatcgataattgctatatcatgccgcggatttttactttcccatctcgcaggaaccgtacaccatgccagtgttacacaaccgcatttccaacgacgcgctaaaagccaaaatgttggctgagagcgaaccgcgaaccaccatttcgttttacaagtatttccacatcgccgatcctaaggcgacccgtgacgctttatatcagctgtttaccgcgctgaatgtttttgggcgagtgtatctggcgcatgagggcattaacgcgcaaatcagcgtacctgcgagcaatgttgaaacatttcgcgcgcagctctatgccttcgacccggctttagagggtttacgcctgaatatcgcgttggatgatgacgggaaatccttctgggtactgcgcatgaaggtacgcgatcgcattgttgccgacggtattgacgatcctcactttgatgccagcaatgttggtgagtatctgcaagcggcggaagtgaacgccatgcttgacgatcccgatgcactatttatcgacatgcgtaaccactatgagtatgaagtggggcactttgaaaacgcgctcgaaattccggcagataccttccgtgagcagctgccaaaagcagtcgagatgatgcaggcacataaagataaaaaaatcgtcatgtactgcaccggcggcattcgttgtgaaaaggccagtgcctggatgaaacataacggattcaacaaagtctggcatatcgagggcggaattattgaatacgcccgtaaggcgcgcgagcagggcttgccggtgcgttttattggcaaaaattttgtttttgacgagcggatgggcgaacgtatatcggatgagattatcgcgcattgccaccagtgcggcgcgccgtgcgacagccataccaactgtaaaaatgatggctgccacctgctgtttattcagtgtccagtatgcgcggaaaaatacaaaggttgttgtagtgagatttgctgcgaagaaagcgcgttaccgccagaagaacagcgacgccgtcgggcaggacgtgaaaatggcaataagatctttaataagtctcgtggacgtctgaatacaacactgtgcattcctgatccaacagaataaatatcattgccggatgcgtgccatccggcaacatttcacgcttacttctgctgtacgccttccactgaaataatcagatccacttcctgagaagctggacctaaatctgtcttgatattgaagtccttgagcttaattttgccttcggcctcgaagcctgcacgtttaccaccccatgggtcgtcgccctgaccaattaatttcgcttccagcgtgacgggtttggttacgccattcagcgtcagatcgccggtaatatccagttcgtcaccgtctttcttcacgctggtggaggtgaatgttgcctgtggatattttgcggtattgaggaaatctgcactgcgaagatgtttatcgcgttcggcgtgattagtatcgacgctggtggtgttaattgtcacattcactttatcggcagccggatttttttcgtcaaaggtaaaagtaccgtcgaaatctttaaaggtgccgtataaccagctatagccaaggtgctggatgcggaaattaacaaaggcgtgctgaccttctttgtcaattttgtaatcggcggcaaccgctgaaccggcagagaacatcagggacgcgaaggttaaaccaagcaggctttttttcattttttatactccatagtcagatgacgactttcccagcatgcgcttcagagtgtcgtctttatcgatgaaatgatgcttcagggccataaatccgtgcataacggacagtactacgacgctccacgcgagccaaaaatgcagggcaccggcaaagtctgcctgtgcgccagcgtcggcaagggtcgcggggacgtcaaaccagccaaaaacgctgatcggtttaccatcggcagttgagatcagatagccgctgatgccgatggcgaaaagcaataggtacaatgcgagatgtccagctcttgcggcaagacgagtcatgggcgaataactcggcagcggacccggcggtggagatatgacacgccacagaacgcgaataaccagccccatcattaacaaaataccgatgcttttatgcagttcgggtgctttgtgataccagccatcgtaataactgagcgtgaccatccacagacctaaagcaaacatgccgtagacaataattgcgcttagccaatggaaggccgcagatataacaccatagcgttcaggggtatttgtgaatgacataagtgcatccaaaacgaatttgcgagagaaagaaaatggcgtgtcggagaatgaattgcaacacaaaaataacaaattgaatgatatttatttttatttcaataattttgaattaataatgaaagaatcttcataagtttagtgggttcagcatcagagatgtctggtgagtgctgtagaagcaggaataatctcattcaatttttcacgctaaatgaaagggagattaaatatttgtcagtttatgtcagtgcggaaaactaaaaataaaacacatagatcagatccataattgccaacaatccccagagaaaaagataaagcatcagatgctcgcgaatattattgatgagatagtgcaacagccgacgcattaaatactcctgtaaaaacggcctcattctggaggccgtaatgatgattattggaagcgggaaagcctgaatggcgtcaaatcaaaatcgctttttttgtcttgcgcaaaatcggcagctatttcccctaaaactgacgcaaatttaaaaccgtgcccactcaggccggtaatgagcagtgtattatcgtggccgggtagggtatcgataataaaatcttcgtcaggcgaattatcataggtgcaggcagcgccgtacaggcagcaaccgatacccggcaatacattgcgcaagaacgggaaggcttctgacccatcactggccacttccgcaaacggaacacgttcatccgctgaatggataacctggcctccgttatgtttgccaatcttcaacgcgtcgttttctgccggaaaaccataatattgatcgccattgggcagttcaccggtaaacgccgggaatttattcttcacgctatagcggccatcggcctgataccaggcaaatactttgcgtacgggctggacaggcagctccgggagcaggtcttttacccatgttcccgcgcagacaatcgcttttttcgcctgatactcaccgtcagccgtttcaatagttacgccatcatcgtcatgacgaattgcggtgaccgggcagttgaacagttgcgcacagcccgcttccttcgccagttggatccaggttttaatcgccagttcgctgcgcaaaaaaccggaatcagtttcaaataagccgatgtagttgtccgggacgcgtatttccggccagcgggccataatcccttgcgcatcgagcttttcaacgttgagttgccattgttcggcgctgtgggcgacgttggcgagaaatgtggaatcagccgggccaaggttaatgacgccagagcgtacaaaaatgggatcttcttcgttgtggcgggagagttcatcccacagcgtttgcgcgcggaggaccagcgggacatacttttcgccttcaccataagcatggcgaattaatcgcgtatcgccgtggtggctgccgtgttgatgcggtggcatatgggcgtcggtcattagcacgtttaaaccggcgcgggttgcataatacccggcggcagcgcctacggaaccgctgccaataatgatgagatcgtatttcatttttttctctctgctctcatggtttaagcagagtaattaactgaatgcagatatacaacccagaaatggtaaaggcaccggtgaggtgccttttgggtggatggtcatgtcatgttaatgacgccgatactcgtttacctggaaatcaccggattcaattttggcgattcctgcttctaatatcgaaataaattgtctggcaacatcagtggttaaccagagcgtctgaccaacttcagtcccttcctgctcggacttatttggggtctggtagtgcaaacgcaacatcagcgcatcatagctatcaacggtgctgatgtcccaccctacgagcggatgagtctgaatgacttcattatttttttccatcatggccccctaattcgtgttactagacaacgttattcgaggttcaatgcgtttttatctgaagcaacttcagtataccaataagtaagggtattcaccgaatttttaaagggggaaacagataaatttctgcttttaagatttatatgaacaataaaacagcatgtcattcatatttttttagcatattgtgcaattattttgaggaagtgtagaaattttgtactcaaaattcgtaagtaaaataaaaaagccggggcgacccggcaaaaaaaatcactgcatattattcgctgacaaaccagtcatcggcgctttcccacgtttcctggagaatttcactaatgcgctgtttatcttcttttgtcgcgccaataaccgataaattattcgctgcggcataacgtaccgatacgtggccttcattatcaggaaacgcatactgaatacggcgggaaagttcgccagccagggcgtcaatagccccagctggcaatggagaagttttcgctatggtgacttcaattcgcataatagccccctgttgaatatactggttatttatacaggtaaaataacctaatgacaacaggaagctacgatttttattgtttaacggaccagcgtaccgtttccccggcgaggaatggcaccagcgtgtcatcagtcagtgcgatgctttcagcaacctgttgctcttcacgtaccagttcgatgaatgtgtcgttgaccggcaacccatagaactgcgggccgtttacagaacagaatgcttcaaagtgctgcaaagcattcatttcttcaaagacggtagcgtaactgcccagcgcggttggggcgttgaagcagcccgcgcagccgcaactgctctctttgcgatgacgtgcatgtggcgcagaatccgtaccgaggaatactcgattaaaaccgctggcgaccagttcacgcaatgcctgttggtgaatattacgtttgaggatgggtagacaatacaggtgcggacgcacgcctccaaccagcatatggttgcggttaaacatcagatgctgcggagtgatggtggcagccagccgttcatttccgtcacggacatagtcggcagcatctttggtggtgatgtgctcaaaaacgactttcagcgcagtcaggcgctggcgcagaggttccatcacgctttctataaagcgcgcttcacgatcaaaaatgtcgatatctgcatgtgtcacttcaccatgcaccagtagcggcataccgattttttccatgcgctcaagtaccggcatgattgcgtcaattgacgtcacgccgtggctggagttagtggttgcgtttgccgggtaaagttttgcagcggtgaacacgccttcgttaaatccgcgctccagctcattaggatccagcgaatctgttaaataacaggtcatcaatggggtgaaatcgtgcccggcaggtacggcgtcaagaatacgctggcgatacgccacggcagcctcaacggtggtcacgggcggagccagattgggcattacgatagcccgtccataaatttcgctggtatatggcacgacagtttttaacatgtcgccatcgcggaggtgaaggtgccagtcgtctgggcggcggatctttaatacctgggatggtgcagtcattaatctctatgctccggctgaagggatgtttttgccggacacaaaggataagcggaaacgttttcctttgcacgaaaaataaagggcgcgaatgcgccctcgtgattaatcagtaaatggaatgacaatttcgcctggcttcacttcaatgcctttcgccagttttttcgccattgcttcgccctggctgccatcttcgcgcaggacgtaagcaggttgctggttaaagtaattgcgtaatgcctggttcaaatagggaagcaacgtttgcatcaccgtttgcattttttccggttgtaccgtcgcatcgaccacttccatctctttcaggaagatcgcacctttttctttatcaaacacgggcagcgctttcagcttcagtttcatggtcgctttctgactaccgaacagggagttcatgtccagattggcgtctccggttagggtaaccttattcggctcttcgcgaccaatttggctggtcaggtttgtcagaacaatatgggcgtcagccacgccgggtaaaccgatatcttttgagaaattattatgtttcgcaagcgactggttaatttcttgttcggtgatggtgtattgggtgagttgattacagccaacgagcaggccactgacgatcaatgcagcggcaaataaaaacttgttcatggtagtcctcgacatgaaatctgcgtcaatatcctgacacaacgcagcatgtgtcaccagcgataaactcgccagcagaaaaaactgaaaacggcggcaacccgcgaatacaggctgccgcggcgggtcaggattaaatcgccattgatgataacaaattgatttgtgtctgtttcgccatattatcgcggtaatcagcaacgcggcttggccagttaattccggctaccagcgtcagattacgcagtagcgggaatagctgaatatcatcttccgaaagtttgccattcacggcgttcggtttgacgatcagtttgtccagcgcacgtaaatcatcgctgatattcttaatcagaccgtcagagtgggccagcaggtcggcaaaattacccgcgctggcctctttcttgtcgacgaaatatttgcgcgcggcgggagtagaaaactcatcaaatgccgatttggcaaaacgcggcaacagcagtttgttggcgtagccattgaccttgcgcagccactcttcaatggcaggggaacgtttgccggtcagtaacggtttgccgtcgagtttatcgacatagtgaacgatgtccatgctttctggcatatagcggctgtcatctttttgcagaatgggaacctgtttttgaccgaccatccgggtgggtgtttctgcgtcgtcgttgagcagaacatgtaattcgacggggatatttttcaggccgaaaatcatgcgggctttgaggcagtaagggcagtgatcgtaaatgtatagcttcacgtgactcctccatttggctgtcagttcactttcagtatgaaggagtcaggggggagtatcaaatcaggcgtcgcgttcaagcaaacgacgcgcggcgcgtttctggctaaactgccaacccagcgcaaggaaagtgaagatgccaataatgcccagcatcatccacggaagctctggctggtgcgccgatttgcccaggtcaaacagccagccgccaccgatataaccaatagcgccgccaatcgccagacccagacggctaaaccccatatagctgccgcgagctcttgcgtccgccagcgaagcacttaaggtttcacgcgcaggctcggcaatgatcgacccgatataaaacagacaaatcagggtgaaaagttgttgcaggccgctgaccatgcccaccggcatcatgcttaatgacattatcaacagcccagccatcaaccggtgttccagacgaaaatgcttttcactccagcgggcgatagggtagagcaacgttaacgacagacacgcttcaatggcatacatccatttaacggcagagggcgcgccagccacgtcgttgaccataattggcagcatcagcatcacttgtacagccagcatgtagtaacccgccagcgtcagaacataggtgacaaaacgcttgtcacgcatcacgcgggtcatgccttcgcgaacgggcgtgcgtacggtggagagtttccatgctggtaacaaccacgcattgaacgccgcacatagcacaaatagaactgcccctgtggcgcagaccaggcgaaagtcgtattgcaacagccagctccccaacaatgcgccaatgaccgcaccggcactgtcctgcatcatcaacagcgagaaaaaacgaccacgctgctgtggacggattaatttcaccaccagcgccgaacgcggcggatcaaacaacgtgccaccgagtcccgagagcaggcatgaaaaccacaatagccacggttcgtgggcgatacccattgtggcgaatccggcggcgcgcatcagcataccggtaacaatcatcggtttggcaccaaagcggtcggcaattgcaccgccgaaaatacccagaccttgctgaataaattggcgtagaccgagagcaataccgaccatgacggcggcccagcccatttgatcaacgaagcggatagagatcagcgggaagacaacaaagaaccccagcacgaccagcatattatcgatgagcaggaaatatttacccaggttcctcgcctgcgacacgcgggacatttcccctcccgggaaataaaagatgagcactttctattctgcattgccgctaagacttttcccatcacttcggggacaatatttttttatcaaaacgtcgctttgatagagagtttttatcaaatatgtgaataatgcagaaaatggcattttggacttttcacagggtctggttgcgcaggtatagtaatacttacagcgtattaaagacgttacgggaaggagtaggtatagaatgtttggctatcgcagtaacgtgccaaaagtgcgcttaaccacagaccgactggtcgtgcgtctggtgcatgatcgtgatgcctggcgtcttgcggattattacgcagagaatcgccatttcctcaagccctgggagccagtgcgcgacgaaagccactgttatccatcaggctggcaggccaggctggggatgattaacgaatttcataaacaaggttcagctttctactttggcttattcgacccggacgaaaaagagattattggcgttgccaatttttccaatgttgttcgtggctcttttcatgcctgctatctcggttattcgattgggcaaaaatggcagggcaaaggactcatgtttgaagccctgaccgcagccattcgttatatgcagcgcacccaacatattcatcgcattatggctaattatatgccgcacaataaacgcagcggtgatttactggcgcgactgggttttgaaaaagaaggctatgcgaaagactatctgttgattgatggacaatggcgcgatcacgtactgacggcattaactaccccagactggacgcccggccgctaaggagaatctcatgaaatatcaacttactgcccttgaagctcgcgtgattggttgcttgctggaaaagcaggtgaccacgccggagcaatacccgctctcagtcaatggtgtagtcacggcctgtaatcagaaaacgaaccgtgaaccggtcatgaatctgagtgaatccgaagtgcaggaacagctggataatctggtcaaacgtcattatctacgcacagtgagcggttttggtaatcgggtcaccaaatatgagcaacgtttttgtaattcagaatttggcgatctgaaactgagcgcagcggaagtggcgttaatcaccacgttgttattgcgtggtgcccagacgccaggtgaactgcgcagccgcgccgcgcgaatgtatgaattcagcgatatggcggaagtggagtcgacgctggaacaactggcaaatcgcgaagatggtccttttgtggtgcgtctggcccgcgaaccgggtaaacgcgaaaaccgctacatgcatcttttcagtggtgaggttgaagatcagccggcggtgacggatatgtcgaacgcggttgacggtgatttacaggcccgcgtcgaagccctggaaatcgaagtggcagaactgaaacagcgtcttgattcgttgctggcccatctgggagattaaagtgaaaaaattacgtatcggcgtagtgggattaggtggcattgcgcaaaaagcgtggttaccggtgctggcggcagcgtctgactggacgttacaaggagcctggtcgcctacgcgcgcgaaagccctgccaatttgtgaaagctggcgcattccttatgccgattcgttatccagccttgccgccagttgcgatgcggtttttgtgcattccagcaccgccagccactttgacgtggtcagtacgttactcaatgcgggggtacatgtctgtgtcgataaaccgctggcagaaaatctgcgcgatgctgaacggctggtggaactggcggcgcggaaaaaactgacgttgatggtcggttttaaccgtcgtttcgcaccactctacggtgagttaaaaacgcaactcgccaccgcagcctcgctaagaatggataaacatcgtagcaatagcgtcgggccacacgatctttatttcacgttgctggatgattatctgcatgtggtggataccgcgctgtggttgtcgggcggcaaagcctctctggatggcggtacgctactgactaacgacgctggcgaaatgctgtttgccgagcaccatttttcggctggtcctttgcagatcaccacctgtatgcatcgccgtgccggaagtcagcgtgaaaccgtgcaggccgtgactgacggtgcgctcatcgacattacggatatgcgcgaatggcgtgaggagcgcgggcagggcgtagtgcataaaccgattcctggttggcagagtacgcttgagcaacgtgggtttgtcggctgtgcgcggcacttcattgaatgtgtgcaaaaccagacagttccgcaaaccgccggcgaacaggccgtgctggcgcaacgtatcgttgacaagatctggcgcgatgcgatgagtgaataaaccctgtaacatctggcggtagcaattcaccataatccaggtagactattcgcctctttcagcgcctgccttgcaggcgttttgcccgtgggtctggattagaacaccgatgaatttattaaaatcgctggccgccgtcagctcgatgaccatgttttcgcgtgtgcttggcttcgcacgagacgcaattgtcgccagaatctttggcgcagggatggcaaccgacgcctttttcgtcgcttttaaacttcctaacttgttacgccgtatctttgccgaaggggcattttcccaggcatttgtaccgattctggcggaatataaaagtaagcagggtgaagacgccacgcgggtctttgtctcttatgtttctggcctgctgacacttgcgctggcggttgtgacggtcgctggcatgctcgccgcaccgtgggtgatcatggtgaccgcgccaggcttcgctgacacagctgacaaatttgccctgaccagccagctactaaagattacctttccctatatcttgctgatctccctggcgtcgctggtgggagcgattctgaatacgtggaaccgcttctcgattccggcgtttgctccaacactgcttaacatcagcatgattggtttcgcgctgtttgccgcaccgtactttaacccaccggtgctggcgctggcgtgggctgttacggtcggcggcgtcctgcagctggtgtatcagctaccgcacctgaagaagatcggcatgctggtcctgccgcgcattaacttccacgatgccggagcaatgcgcgtggtgaaacagatgggaccggcgatccttggcgtctctgtgagccagatctccttaatcatcaacaccatttttgcctcgtttcttgcttccggttcggtgtcttggatgtattacgccgaccgcttaatggagtttccgtccggtgtgctgggcgtggcgcttggcaccattttgctgccgtcgctgtcgaaaagttttgccagtggcaatcatgatgaatacaaccgtttgatggactgggggttgcgtctttgtttcctgttggcgctgccgagtgcggttgcgttgggcattctttccggtccgttgaccgtttcgctgttccagtacggtaaatttaccgcgtttgatgcgctgatgacccagcgggcgttaattgcctactcggtgggtttgattggcctgattgtagtgaaagtgttggctcctggcttttattcccgccaggacattaaaacgccagtgaaaattgccatcgttacgctgattttaacgcaattgatgaacctggcgtttattggtccgttgaaacatgccgggctgtcactttctattggtctggcggcgtgtctgaatgcttcgctgctttactggcagttgcgtaagcagaaaatctttaccccgcaacccggctggatggcgtttctgttgcgtctggtggtggcggtactggtgatgtctggcgtgcttttaggtatgttacatatcatgccggagtggtcattgggtaccatgccctggcgtttactgcgtttaatggcggtcgtgctggcggggattgccgcgtacttcgctgcactggcggtactgggcttcaaagttaaagaatttgcccgccggacggtgtaacaatgcattccggcctgcagtgcaggccggagataatcttcagatcgaaatctttttaccgccgcgatgggttgttgaggtctgaccgttcgccccatatagcgtcggttcctgatgcggtttcaacatttccagcgcctgttgattgcgctcaatctgtccttccagtaaccagccgttatgttgattcatttggcgtagttgctgcgttttcacagtaatttcctgccagcgttgactaatatcaacgctatttgctgtattgggttctttcctgcgtaactgttcgaggtaatccagcgtcgccagcagtgagcttttttgttctgtaatccattgcaactggctgccgttgatctgccccatagagagatgttgctgctcttgatccattaccgttttgagatcgttaagcacagcggacatctggtcgaggatctctgcaagacgtgtcatacgatcagttactctgcaagtcttgctgcgcttcgttgatcagcgcatcggcaattttgccggtgtccatttttagttcaccgttacgaatcgccagttttaacgcttcgacacgttcaagattgatatcactgctgccgggttgcatcagttttgcttgcgcgtcgcttaacgtcacactggtgctggtggaggcggttgtttttgccgcccggctgttcgttaccggcgcgtcagtggtttcgcgcggttgaacggtgcttacaggcttcagaggcgaagtgcgatcaatactcatggtttattcctcattgagggcgcttttatcatgtgttgcttatttatcggcaagggacgggtaatctttaacagcttacaggtttataagaatattcccatctgcatcaacaacgccgctgactacctgtcccgataccatgcgcacccgcgcattctgtgcgacggctgcattgttcagcgcctgaccttctgcgttggcgctaaacccatcaccgctggcgatcacattgacgcgttgtcccgcttttacccgccatgcctggcgaaactgggttaactggataggttgatcgggtgatagatcgcgcaggctaatggcatcaacaagttgattgatatccagcaccgtacgcggtggcagggtatccagccgtccgcgtttcagtttgacattgccagcttccagctttcctccccgcgcaatgggcatcgcggcaaccacataatttcctgtggcctgtacattaacctgtaaatatcgtttgtcgttaccgcagcgtgccaacacattcacattgccccacaggcgggaattattgctcatcgaaagcaatggctgctcgcatggcggtagtagattgggcgctgtacgaatagaaacacgaacctcatcacttacccccgcgagttgggcgctaaaaaagttgtgcaattgcgatgtgagattgctcgccgtacttaacggactgaacagtatcgcgatgatcgccacgctacgttttattatcagcattttcgcccccagccatttctacaacgtgaattgtacctgtccgcaatgaccatcaacggcataaatagcgacccattttgcgtttattccgccgataacgcgcgcgtaaaggcatttaagctgatggcagaattttgatacctgcggaggagatatgctcgataagctcgacgccgccttacgttttcaacaagaggcgctcaatctgcgcgcccagcgtcaggaagtgctggcagcaaacatcgccaatgccgatacccctggttatcaggcgcgcgatatcgattttgccagtgaacttaaaaaagtcatgcaacgtggacgggatgcaaccagtgtggttgcactgacgatgacctcaacgcaacacattccggcgcaggcgctgacgcctcctaccgcagaactgcaataccgtattccggaccagccttcgcttgacggtaataccgtcgatatggatcgcgaacgcacccagtttgccgataacagcctgcaataccagatgagccttagcgcgttgagcgggcaaatcaaaggcatgatgaacgttttacagagcggaaattaacggatggcactgctgaatatttttgatatcgccgggtcggcgttaactgcccagtcccagcgcctgaacgtggcggccagtaatctggcgaatgctgatagcgtgaccggtcccgatggacagccatatcgggcaaaacaggtggtattccaggttaacgctgcaccaggtgctgcgacaggcggcgtaaaggttgccgatgttatagaaagtcaggccccggacaaactggtttatgaaccgggtaatccgctggcagatgcaaagggctacgtaaaaatgccgaacgttgatgttgtcggagagatggttaacaccatgtcggcgtcacgcagctatcaggccaatgttgaagtgctcaacacggtgaaaagcatgatgctgaaaacccttacgctcggtcaataaaggagaaagctatgtccattgcggtaaccaccaccgatccgacaaataccggcgtcagtaccaccagcagtagttcgctcacgggcagcaacgccgcagatttacaaagcagttttctgactttgctggtggcgcagctgaaaaaccaggacccgaccaatccaatggaaaacaacgagctgacgtcgcaattggcacaaatcagcacggtcagcgggattgaaaaactcaataccacgctcggatctatttccggacagattgataacagccagtcgttacaggccagtaacctgatcggtcacggcgtgatgatccccggcaccactgttcttgcgggaaccggcagtgaagaaggggctgtgaccacgaccacgccgtttggtgttgagctgcaacaggcggcagacaaagttacggccaccatcaccgataaaaatggcgcggttgtgcgcaccattgatattggtgaactgaccgccggagttcacagtttcacctgggacggtacgttgactgatggcagcactgcgccgaacggttcttacaatgtagcgattagcgccagtaacggtggtacacaactggttgcccagccgctgcagtttgctctggtgcagggtgtgatccgcggcaacagcggtaatacgctggatctcggcacttacggcaccaccaccctcgacgaagtacggcagataatttaagccttcacatttcaggagtcagtcatggccttttctcaagcggttagcggattaaacgctgccgccaccaacctcgatgttattggcaacaatatcgccaactccgccacctacggctttaaatcaggcacggcctcttttgccgatatgtttgccggttcgaaagtgggactgggggtaaaagttgccggtatcactcaggactttaccgatggcacgaccaccaacaccgggcgaggtctggacgttgctatcagccagaacggttttttccgtctggtagacagcaacggttcggtgttctacagccgtaacggacaatttaagctggatgaaaaccgtaacctggtgaatatgcaaggtttacagctgacgggttacccggcaaccggtacgccgccgactattcagcaaggggcgaatccgaccaatatttcgatcccgaataccctgatggcagcgaaaactaccaccacggcatcgatgcagatcaacctgaattccagtgatccgcttcctactgttacgccattcagcgccagcaatgcggatagctataacaaaaaaggttcggtgactgttttcgacagtcagggtaatgctcatgacatgagcgtctactttgtgaagaccggggataataactggcaggtctacacccaggatagcagtgatccaaacagcattgcgaagacagcgacaacactggaatttaatgctaatggcacattagtggatggtgcgatggcgaataatatcgcaaccggcgcaattaacggtgcagaacccgccacgtttagtctgagcttcctcaactccatgcagcaaaataccggcgctaacaatattgtggcaaccacccagaacggctacaaaccgggcgatctggtgagttatcaaatcaatgatgacggtacggttgtcggcaactattccaacgaacaaacccaactgctggggcagattgtactggcgaactttgccaacaacgaaggtctggcatccgaaggcgacaacgtctggtctgcgacgcaatcttctggcgtggcgctgttggggacagccgggacgggaaactttggcaccctgaccaacggtgcgctggaagcgtccaacgtcgatctcagtaaagaactggtcaatatgatcgttgcccagcgtaactatcagtctaacgcccagaccatcaaaacccaggaccagatcctcaacacgctggttaacttacgctaatcgctgacgggatagctcaatggatcacgcaatttataccgcgatgggagcagccagccagacactgaatcaacaggcggtaaccgccagtaatctggccaatgcctcaacgcccggttttcgcgcgcagttgaatgctttacgcgcggtgccagtggaagggctttctctgcccacgcgcacgttggtcacggcgtcaacgccgggcgcagatatgacgcccggcaaaatggattacacctcgcgcccgctggacgtcgcgttgcagcaggatggctggctggccgtgcagaccgctgacggcagcgaagggtatacgcgtaatggcagcattcaggttgatcccaccgggcaactgacaattcaggggcatccggtgataggcgaggctgggccaattgctgtgccggaaggggcggaaatcactattgctgccgatggcacaatctcggcgctcaatccgggcgatccggcaaatacggttgcgccagtagggcgtcttaaactggtgaaagccacgggcagcgaagtgcagcgcggtgacgacggcatttttcgtttaagcgcagaaacccaggccacgcgtgggccggtactgcaggcagatccaaccttgcgtgtgatgtcgggggttctggaaggcagtaacgtcaatgccgttgcggcaatgagcgacatgattgccagcgcgcggcgttttgaaatgcagatgaaggtgatcagcagcgtcgatgataacgcaggccgtgccaaccaactgctgtcgatgagttaattgaaaggatacatgacaagtataagttgcccgatgcgcaagtttatcgggtctatgggggcaatcgcaatttatcgattttgcgagcacttgtaggccggataaggcgtttacgccgcatccggcaagaagacatatgcactttgtcactaatccactacaggacattttatgatcagttcattatggatcgccaaaacgggccttgacgcccagcaaaccaatatggacgtcattgccaacaacctggcaaacgtcagtactaacggttttaagcgtcagcgcgcggtgtttgaagatctgctttatcaaaccattcgccagccgggggcacagtcttccgaacaaaccaccttaccctccggattacaaatcggcacgggggtacgcccggtcgccactgaacgcttacacagccagggaaacctgtcgcagaccaacaacagcaaagatgtcgcgattaaagggcagggctttttccaggtgatgttgccagatggttcatcagcctatacccgtgacggctctttccaggtggatcagaacgggcagctggtgacggctggtggttttcaggtgcagccagcgatcaccattccggcgaatgcgttaagtatcaccatcggtcgtgatggcgtggtcagcgtaacccaacaaggccaggcagctccggttcaggttgggcagctcaatctcaccacctttatgaatgacaccgggctggagagcattggcgaaaacctctacaccgaaacgcaatcctctggtgcaccgaacgaaagcacgccgggcctgaacggcgcgggactgctgtatcaagggtatgttgaaacgtctaacgtcaacgtggcggaagaactggtcaatatgattcaggtgcaacgcgcttacgaaatcaacagtaaagcggtgtccaccaccgatcagatgctgcaaaaactgacgcaactctaaggcttaaccggtggcaggttcaccggtttactgatttttgaagatgatagccatgcaaaaaaacgctgcgcatacttatgccatttccagcttgttggtgctttcactaaccggctgcgcctggataccctccacgccgctggtgcagggggcgaccagtgcacaaccggttcccggtccgacgcccgtcgccaacggttctattttccagtctgctcagccgattaactatggctatcaaccgctgtttgaagatcgtcgaccacgcaatattggcgatacgctgaccatcgtgttgcaggagaacgtcagcgccagcaaaagctcctctgcgaatgccagccgtgacggtaaaactaattttggctttgatactgtgccgcgctatttgcaggggctgtttggtaacgctcgtgccgatgtcgaagcctccggtggtaacacgttcaacggaaagggcggggccaatgccagcaatacctttagcggcacgttgacggtgacggttgaccaggtactggtcaacggcaacctgcatgtggtgggtgaaaaacagattgccattaatcagggtaccgaatttattcgcttctctggcgtggttaatccacgcactatcagcggcagcaataccgtaccgtctactcaggtggcggatgcgcgcattgaatacgtaggcaatggctacattaacgaagcgcaaaatatgggctggttgcagcgtttcttccttaacctgtcgccaatgtaagtgaggctgtggtgattaaatttctctctgcattaattcttctactggtcacgacggcggctcaggctgagcgtattcgcgatctcaccagtgttcagggggtaaggcaaaactcactgattggctatggtctggtggtggggctggatggcaccggtgaccagacaacccagacgccgtttaccacacaaacgcttaataacatgctctcacagctgggaattaccgttccgacgggcaccaatatgcagctaaaaaacgtcgctgcggtaatggtgacagcgtcacttcctccgtttggacgtcaggggcaaaccatcgatgtggtggtttcttccatgggaaatgccaaaagcttgcgtggaggtacgttgttgatgacaccgcttaagggcgttgacagtcaggtgtatgcgctggcgcagggcaatattctggttggcggcgcaggagcctccgctggcggtagcagtgttcaggttaaccaactgaacggtggacggatcaccaatggtgcggttattgaacgtgaattgcccagccagtttggcgtcgggaatacccttaatttgcaacttaacgacgaagatttcagcatggcgcagcaaatcgctgacaccatcaaccgcgtgcgtggatatggcagcgccaccgcgttagatgcgcggactattcaggtgcgcgtaccgagtggcaacagttcccaggtccgcttccttgccgatattcagaatatgcaggttaatgtcaccccgcaggacgctaaagtagtgattaactcgcgcaccggttcggtggtgatgaatcgcgaagtgaccctcgacagctgcgcggtagcgcaggggaatctctcagtaacagttaatcgtcaggccaatgtcagccagccagatacaccgtttggtggtggacagactgtggttactccacaaacgcagatcgatttacgccagagcggcggttcgctgcaaagcgtacgttccagcgccagcctcaataacgtggtgcgcgcgctcaatgcgctgggcgctacgccgatggatctgatgtccatactgcaatcaatgcaaagtgcgggatgtctgcgggcaaaactggaaatcatctgatgatcagcgacagcaaactactggcaagtgcggcctgggatgcgcaatcactcaacgaactaaaggcgaaagcgggcgaagatccggcggcaaatatccgtccggtggcccgtcaggtggaagggatgttcgtgcagatgatgttgaaaagcatgcgcgacgctttaccaaaagatggcctgttcagcagcgagcacactcgcctgtataccagtatgtatgaccagcagattgcccaacagatgacggcgggcaaaggtctggggcttgcagagatgatggttaaacagatgacgccagaacaaccattgccagaggagtccacgccagcagcaccgatgaaattcccgctcgaaactgtggtgcgttatcaaaatcaggcgctttcgcagctggtgcaaaaggccgtgccacgtaactacgatgattcgctgccgggtgacagtaaagcattcctcgcgcaactctcgctgcccgcccaactggcaagccagcaaagcggtgtgccacatcatttgatcctcgctcaggcggcactggaatctggttgggggcaacggcaaatccgccgcgaaaacggcgagccgagctataacctgtttggtgtcaaagcctctggcaactggaaagggccagttactgaaatcaccacgactgaatatgaaaacggcgaagcgaagaaagtaaaagcgaagtttcgcgtctacagctcgtatctggaagccttgtcggattacgttgggctgttaacgcgtaacccgcgctacgccgccgtgacgaccgccgcgagtgcggaacagggggcgcaggccctacaggacgcgggctatgccaccgatcctcactatgcccgcaaactcaccaacatgattcagcagatgaaatcgataagcgacaaggtgagcaaaacctacagtatgaacattgataatctgttctgaataactcaagtccggcgggtcgctgccgataatactctgtaattgaaggcttataaggaacctccatgtccagcttgattaataacgccatgagcggactgaacgcggcccaggcggcgttaaatacggcaagtaataatatctccagctataacgttgccggatatacccgccaaaccactattatggcgcaggccaatagcacgttgggcgctggcggctgggttggcaatggtgtctacgtttctggtgtgcagcgtgagtatgatgcgtttattaccaaccagttacgtgcggcgcagacgcaaagtagcggtctgactgcccgctatgagcagatgtcgaaaatcgacaatatgctctccaccagtacctcttcgctggcaacacagatgcaggatttcttcaccagcctgcaaacgctggtgagtaacgcggaagacccggcagcgcgccaggcgctgattgggaaatcagaaggattggtgaatcagtttaaaaccaccgatcaatatctgcgcgaccaggacaaacaggtcaatatcgcgataggtgccagcgttgatcagatcaacaactacgctaaacaaattgccagcctgaacgatcaaatctcgcgcctgacaggcgtgggggcaggggcgtcacctaacaatctgctggatcaacgcgatcaactggtgagcgaattaaaccagattgttggtgtagaagtcagcgttcaggatggcggcacttataacatcacgatggccaatggttactcactggttcagggaagtacggcgcggcaactggcggcagttccttccagcgctgacccttctcgtacgactgtcgcttatgttgatgggacggcaggcaatattgagatcccggagaaattactgaataccgggtcgctgggcggcattctgacattccgttctcaggatctggaccagacgcgtaatacgcttggacaactggcgctggcatttgccgaggctttcaacacccaacacaaagccggatttgatgctaacggcgatgccggtgaagatttctttgctatcggtaagcccgcggttctgcaaaacacgaaaaacaaaggtgacgttgcgatcggtgccacggtaactgatgcctccgcggtactggcgacagattacaaaatctcgttcgataataatcagtggcaggtcacccgccttgccagcaataccacttttacggtgacgccggatgccaacggtaaagtggcatttgatggtctggagttgacgtttacaggaacgcctgccgttaacgacagcttcacgctgaaaccagtaagtgacgccatcgtcaacatggatgtattaatcaccgacgaagcgaaaatagcgatggcgagcgaagaagatgcgggtgatagcgataaccgcaacggtcaggccctgctggatctgcaaagcaacagtaaaacggtgggcggtgcgaaatcctttaacgacgcttatgcctcgttagtgagtgatatcggtaataaaaccgcgacgttgaaaaccagtagcgccacgcaaggtaatgtggtgacgcagctttccaatcagcagcagtcgatttccggtgtcaatctcgatgaggagtacggaaatctgcaacgttttcagcagtattacctggcgaatgcgcaggttctgcagacggcaaacgcgatttttgatgcgctgattaacattcgctaaggggagataagatgcgtttcagtacacagatgatgtaccagcaaaacatgcgtggtatcaccaattctcaggcagaatggatgaagtacggcgaacagatgtcgacgggtaagcgagtcgttaacccttctgacgatcccattgctgcatcacaagccgtagttctctcccaggcacaggcgcaaaacagccagtacacgctggcgcgtactttcgccactcaaaaagtgtcactggaagagagtgtacttagccaggtcaccactgctatccagaatgctcaggaaaaaattgtctacgccagcaatggcaccttgagtgacgatgaccgggcctcgctggctacggatattcaggggcttcgtgaccagttgctgaatctggcaaacaccactgacggtaacgggcgctacatttttgccggttataaaacagagactgcgccgtttagcgaagagaaagggaaatacgtcggtggagcagaaagtattaaacaacaggtcgatgcttcgcgttcgatggtgatagggcacacgggtgacaaaattttcgacagtattaccagcaacgcggtagcggaaccagacggtagcgcttctgaaaccaatctttttgccatgctggatagtgccatcgcagccctgaaaacgccggtcgcggatagcgaagcggataaagaaaccgccgctgcggcgttagataaaaccaaccgcggactgaaaaactcgctgaacaatgtgctgactgttcgcgcggaattaggcacgcagctgaacgaactggagtcgctggattcattaggtagcgatcgcgctttagggcaaacgcagcagatgagcgatctggttgatgtggactggaatgcaactatttcatcttacatcatgcagcaaacggcattgcaggcatcgtataaagcatttaccgatatgcagggattgtcgctcttccagctcagcaaataatttcgctttaaaacatatcatgaaactgggtatgttttgtctgcctgctctgggatcgctggggcgggcatttttttgcctattttgcattgttggttagcaaggatgccattcgatgaattttaatatgttgattcaaagatgaaataaaaaagccctggcagttaccagggcttgattactttgagctaattattactcaacaggttgcggacgcgcaggagcggcagaggcatgatgtgttgccgtatgaccacctgcggcacctttaccttcgaaggcaaaagtagggcgctgccagtcactgtgacgcggtgcctccggaacatattccggtgctggagcgcgcgtcattggcgcggtagcgtggttatgctcaacggtgacctcaggttcgaccgcagctaccgtttcaacttctgctgcgacttcagcgactactggcgcggcaggttgagcaacaacttcaggttcagcaactacaacctcagcagtttcgacaacttcttcaatatctgccgtctcttcctgcggttcaaccaccggttctgcttgttctgcaacttcctgggctacggcaacatcagactcggtaatcacctgcggctgttcagttaccgcggcagcgatcacttcaggatgcgtcgtttcaaccacttccggttgcggttcggcaacctgaacgggggcttctacgacaccggccacttcttcaacaactggcgcgctaacaaccggttcgatagcggcggcgacagggacctcagtcaccatcggctgcacatgtacttcttcctgttcgcgctgctcttcaacctgtacatcttgcggacgtacaattggatagcggatccagactttgccagaggccagttccggagacgcgcacgctacggtcaacggcattggcgactgggttggataacgctcgtcacgatagcgacgacgacgctgaccacttacgcgcaggtgacgaggcgagcggcgagaacgacgcggcatgccaccgttgtcacggttatcagcattgttctcttcttgctgttctggtgcagtttgcgctacgactggcagcgggactttcaccagttctgtgcgtggagctggcgcttcctgaacaattggttcggcagcgacagtttcttcaaccaccggtgcgactaccgcttcttcggctacgctttgctcgtaacgcactttctgattgagctgacgctgtttacgacgcggctgaaccggacgtacacgttcttcctgttcggtttcctgaacagattgctcttcaacattcagcgccttcgcttcttgttgcgcctgacgtttatcatcattacggcggcggctacgttcacgacgcggcgcttgctgctcgtcggcggtacgcgctttttccgttacctcagcctgctgacggctctcacgcgtctcggcagtctgctgctgtgcctggcgacgattacgacggttttcttcgcgattatcgctgccttcagtacgttcactacgggtgtcgcggcgctcattacggtcacggcggttgttctgacgaggcttgcgacgatcctgttgacgttccggtttcgcttctgctttcggtgctggttgctcggtcggtttggtttcttcaccaccgctgaacagcgctttcagtgcgccgaagaagcggctcaacagcccaggttgtgcaggagctgctggtgttgccggtgcagctttcggtgctggagctacaacaggcgcggcaggttcagctggcgttggcgcaggcggcacatccggcatggcaaaggttgccagcgcaggttgttccggacgcttacgttcagcgaactcttcttcagacggcagcgccatcgcttcttcatgcagcttcggcagcatgtagcttaaggttggggtttcttcccctttacgcacgcgcagcacgtggtagtgcggggtttccatctgatcgtttggcacaattacacagcgcacaccgtcctgacgagtttcaatggcatttaccgcagaacgtttttcattcagcaggtaagaagcgattggcacaggaacaatggcgtgaacttcctgggtgttctctttcagcgcttcttcttcgatcagacgcagaatagagagcgacagcgattcgttgtcacgcacggtgccagtaccagaacaacgcggacaaacgtgatgactggattcacccagtgatgggctcaggcgctgacgggacatttccagcaggccaaagcgagaaatatggctgatttgaatacgcgcacggtcctgacgcaccgcttcacgcagacggttttctaccgcacgctggtggcgtactggcgtcatgtcgatgaagtcgataacaatcaggccgccgaggtcacgcaggcgcagctgacgagcaatctcatcggcagcttcgaggttagtgttaaacgcggtttcttcgatatcgccgccgcgggtcgcgcgtgcggagttgatgtcgatggccgttaacgcttcggtgctgtcgataacaatggaaccaccagacggcagacgaacttcacgctggaaggcggactcgatctgtgactcgatctggtagtggctgaacagcgggatctcgccggtgtacagtttgattttgctgctgaaatccgggcgacctaatgcagcgatatgctgacgtgccagttcgagcactttcgggttatcgataaggatttcgccgatgtcctgacgtaagtaatcgcggaatgcgcgaacgattacgttgctctcctgatgaatcaggaacggggccgggcggctttcagcggcttttttgatggcttcccagtgtttcagacggaagcttaaatcccattgcagcgcctcagcagatttgccgacgccagcggtgcgcacgataagccccatgccttccggcagttcaaggcttgccagtgcttcttttaattcggtacggtcgtcgccttcgatacggcgagaaatgccacccgcgcgcgggttgttcggcatcagaaccagatagctacccgccagactgataaaggtggttaatgccgcgcctttgttgccgcgctcttctttatcgatctgaacaatgacttcctgaccttcacgcaacacatctttaatgttgggacgaccatgagcactgtagttagcagggaaatattcgcgggcaatttcttttagtgggaggaaaccgtgacgttcagcgccgtaatcaacaaaagcagcttccagactcggttcaatgcgggtgattttacctttgtagatgtttgcctttttctgctcgtgccctggactttcgatatccaggtcatacagacgctgcccatctacaagggcaacgcgcaactcttcctgctgagttgcgttgattaacattcttttcatcgtaacttactcattattcttacattgacgactaagctgcgggcaaagtaacgcctttccgggtgtgaaccgatggcctcgtgtctagtcgcgtcgccaacctcacggttatcgtcagctcaaagaggcgcagagtgtcggttgcccgtttttcatgcggaaaaacagcgcaattatcaaagaaacagactgggtattactctccagaaatatttccatctaccggtaaggactgcaacccgcagcccgctaactgcctgaaagatcaatacgtcttacgccattgctgcgtggatgatcggtcgggcaaaatgggttattccgtaaaatttcttgttttaacaaggatggacacggaaacggcctcattattccactgcaagccttgttatagcaagatgacttttaccatttatcacccgcttactcacagttttttcacttcttgctggtgattggtttaataaccatcaataaagtgatcacgcagtgaagtaataaggtgcaaaagtaaatataagcatagaaaaatgagtggcgcgaatcctgttggctaattagaatcgccaaccatgaaaacagagactccatccgtaaaaattgttgctatcaccgctgacgaagcggggcaacgtatcgataactttttgcgtacccaattgaaaggcgtaccaaaaagtatgatttaccgtattttgcgtaaaggcgaagtgcgggtgaacaaaaaacgtattaagcctgaatataaactcgaagcgggtgatgaggtgcgtattccaccggttcgcgttgctgagcgggaagaagaggcggtttcgccacatctgcaaaaggtggcggcgctggcggacgtcatcttatatgaagatgatcacatcctggtgctgaataaaccttccggtacggcggtacatggcggcagtggtttaagcttcggcgttattgaaggtttgcgggcgttgcgcccggaagcgcggttccttgaactggttcatcgtcttgaccgggacacctcaggtgttttgctggtagcgaaaaaacgctcggcgttgcgttctctgcatgagcaattacgtgaaaaagggatgcaaaaagattacctggcgctggtgcgcggtcagtggcagtcgcatgtgaagagcgttcaagcaccgttactgaaaaatattctgcaaagcggcgaacgtatcgtgcgtgtgagtcaggaaggcaaaccgtcggaaacacgctttaaagtggaagaacgctatgcatttgccaccctggtgcgttgtagcccggtaacagggcgtactcaccagatccgtgtgcatacacaatatgcgggtcatccgattgcctttgacgatcgctacggtgaccgtgaatttgacaggcagctcactgaagcaggcacgggattaaatcgcctgttcctgcacgctgcagcgttgaagtttactcatccggggaccggtgaggtgatgcgtatcgaagctccgatggatgaaggtttgaagcgttgtttgcaaaagctgcgtaacgcgcgctaatacaagcatataaacctgataatgggcggttggcctgataaggcgtttacgccgcatcaggccgccagcaccgattgccggatgcgacgtaaccacatccggcgcaaaaaactatcccatcagcgggtttttcccttcccgacgtaacatctgacacagcgcgattagcggtaaaccaaccagcgtgttaggatcacgcccctctaaacgctcaaacagcgtaatgccaaatccttcactcttaaagctacccgcgcagtgcaggggatgctctttacgcacgtaattatcaatctccgcctcgctcaggtgacggaaatggacgtcaaaaggctccacttctgtttgcagatgcccattcgccgaattaaacaacgccagtccagtatagaaggtgacgatattgccgctggctttgcgtaattgcagacgggcattttcttccgttaacggtttaccggtgatttcgccatcaagaacacatacctggtctgaaccaataattaaatgatccggataacgtgacgccagagattgcgctttttcttgtgccagtcgaagcaccaactgtcgcggtgattcgtcgctgcgtggggtttcgtcgacctctggtgctgcacattcaaaagagatttgcagtttttccagaagagcgcgacgccatggcgaggtggaggctaaaataagtttaggcatatttttttccatcagatatagcgtattgatgatagccattttaaactatgcgcttcgttttgcaggttgatgtttgttatcagcactgaacgaaaataaagcagtaacccgcaatgtgtgcgaattattggcaaaaggcaaccacaggctgcctttttctttgactctatgacgttacaaagttaatatgcgcgccctatgcaaaaggtaaaattacccctgactctcgatccggttcgtacggctcaaaaacgccttgattaccagggtatctatacccctgatcaggttgagcgcgtcgccgaatccgtagtcagtgtggacagtgatgtggaatgctccatgtcgttcgctatcgataaccaacgtctcgcagtgttaaacggcgatgcgaaggtgacggtaacgctcgagtgtcagcgttgcgggaagccgtttactcatcaggtctacacaacgtattgttttagtcctgtgcgttcagacgaacaggctgaagcactgccggaagcgtatgaaccgattgaggttaacgaattcggtgaaatcgatctgcttgcaatggttgaagatgaaatcatcctcgccttgccggtagttccggtgcatgattctgaacactgtgaagtgtccgaagcggacatggtctttggtgaactgcctgaagaagcgcaaaagccaaacccatttgccgtattagccagcttaaagcgtaagtaattggtgctccccgttggatcggggataaaccgtaattgaggagtaaggtccatggccgtacaacagaataaaccaacccgttccaaacgtggcatgcgtcgttcccatgacgcgctgaccgcagtcaccagcctgtctgtagacaaaacttctggtgaaaaacacctgcgtcaccacatcactgccgacggttactaccgcggccgcaaggtcatcgctaagtaatcacgcatctgcgtgatgaagcttagtgaggattttccccaggcaactggggaaagaccaaaccgggcggcgacgataccttgacacgtctaaccctggcgttagatgtcatgggaggggattttggcccttccgtgacagtgcctgcagcattgcaggcactgaattctaattcgcaactcactcttcttttagtcggcaattccgacgccatcacgccattacttgctaaagctgactttgaacaacgttcgcgtctgcagattattcctgcgcagtcagttatcgccagtgatgcccggccttcgcaagctatccgcgccagtcgtgggagttcaatgcgcgtggccctggagctggtgaaagaaggtcgagcgcaagcctgtgtcagtgccggtaataccggggcgctgatggggctggcaaaattattactcaagcccctggaggggattgagcgtccggcgctggtgacggtattaccacatcagcaaaagggcaaaacggtggtccttgacttaggggccaacgtcgattgtgacagcacaatgctggtgcaatttgccattatgggctcagttctggctgaagaggtggtggaaattcccaatcctcgcgtggcgttgctcaatattggtgaagaagaagtaaagggtctcgacagtattcgggatgcctcagcggtgcttaaaacaatcccttctatcaattatatcggctatcttgaagccaatgagttgttaactggcaagacagatgtgctggtttgtgacggctttacaggaaatgtcacattaaagacgatggaaggtgttgtcaggatgttcctttctctgctgaaatctcagggtgaagggaaaaaacggtcgtggtggctactgttattaaagcgttggctacaaaagagcctgacgaggcgattcagtcacctcaaccccgaccagtataacggcgcctgtctgttaggattgcgcggcacggtgataaaaagtcatggtgcagccaatcagcgagcttttgcggtcgcgattgaacaggcagtgcaggcggtgcagcgacaagttcctcagcgaattgccgctcgcctggaatctgtatacccagctggttttgagctgctggacggtggcaaaagcggaactctgcggtagcaggacgctgccagcgaactcgcagtttgcaagtgacggtatataaccgaaaagtgactgagcgtacatgtatacgaagattattggtactggcagctatctgcccgaacaagtgcggacaaacgccgatttggaaaaaatggtggacacctctgacgagtggattgtcactcgtaccggtatccgcgaacgccacattgccgcgccaaacgaaaccgtttcaaccatgggctttgaagcggcgacacgcgcaattgagatggcgggcattgagaaagaccagattggcctgatcgttgtggcaacgacttctgctacgcacgctttcccgagcgcagcttgtcagattcaaagcatgttgggcattaaaggttgcccggcatttgacgttgcagcagcctgcgcaggtttcacctatgcattaagcgtagccgatcaatacgtgaaatctggggcggtgaagtatgctctggtcgtcggttccgatgtactggcgcgcacctgcgatccaaccgatcgtgggactattattatttttggcgatggcgcgggcgctgcggtgctggctgcctctgaagagccgggaatcatttccacccatctgcatgccgacggtagttatggtgaattgctgacgctgccaaacgccgaccgcgtgaatccagagaattcaattcatctgacgatggcgggcaacgaagtcttcaaggttgcggtaacggaactggcgcacatcgttgatgagacgctggcggcgaataatcttgaccgttctcaactggactggctggttccgcatcaggctaacctgcgtattatcagtgcaacggcgaaaaaactcggtatgtctatggataatgtcgtggtgacgctggatcgccacggtaatacctctgcggcctctgtcccgtgcgcgctggatgaagctgtacgcgacgggcgcattaagccggggcagttggttctgcttgaagcctttggcggtggattcacctggggctccgcgctggttcgtttctaggataaggattaaaacatgacgcaatttgcatttgtgttccctggacagggttctcaaaccgttggaatgctggctgatatggcggcgagctatccaattgtcgaagaaacgtttgctgaagcttctgcggcgctgggctacgacctgtgggcgctgacccagcaggggccagctgaagaactgaataaaacctggcaaactcagcctgcgctgttgactgcatctgttgcgctgtatcgcgtatggcagcagcagggcggtaaagcaccggcaatgatggccggtcacagcctgggggaatactccgcgctggtttgcgctggtgtgattgatttcgctgatgcggtgcgtctggttgagatgcgcggcaagttcatgcaagaagccgtaccggaaggcacgggcgctatggcggcaatcatcggtctggatgatgcgtctattgcgaaagcgtgtgaagaagctgcagaaggtcaggtcgtttctccggtaaactttaactctccgggacaggtggttattgccggtcataaagaagcggttgagcgtgctggcgctgcctgtaaagcggcgggcgcaaaacgcgcgctgccgttaccagtgagcgtaccgtctcactgtgcgctgatgaaaccagcagccgacaaactggcagtagaattagcgaaaatcacctttaacgcaccaacagttcctgttgtgaataacgttgatgtgaaatgcgaaaccaatggtgatgccatccgtgacgcactggtacgtcagttgtataacccggttcagtggacgaagtctgttgagtacatggcagcgcaaggcgtagaacatctctatgaagtcggcccgggcaaagtgcttactggcctgacgaaacgcattgtcgacaccctgaccgcctcggcgctgaacgaaccttcagcgatggcagcggcgctcgagctttaaaagaggaaaatcatgaattttgaaggaaaaatcgcactggtaaccggtgcaagccgcggaattggccgcgcaattgctgaaacgctcgcagcccgtggcgcgaaagttattggcactgcgaccagtgaaaatggcgctcaggcgatcagtgattatttaggtgccaacggcaaaggtctgatgttgaatgtgaccgacccggcatctatcgaatctgttctggaaaaaattcgcgcagaatttggtgaagtggatatcctggtcaataatgccggtatcactcgtgataacctgttaatgcgaatgaaagatgaagagtggaacgatattatcgaaaccaacctttcatctgttttccgtctgtcaaaagcggtaatgcgcgctatgatgaaaaagcgtcatggtcgtattatcactatcggttctgtggttggtaccatgggaaatggcggtcaggccaactacgctgcggcgaaagcgggcttgatcggcttcagtaaatcactggcgcgcgaagttgcgtcacgcggtattactgtaaacgttgttgctccgggctttattgaaacggacatgacacgtgcgctgagcgatgaccagcgtgcgggtatcctggcgcaggttcctgcgggtcgcctcggcggcgcacaggaaatcgccaacgcggttgcattcctggcatccgacgaagcagcttacatcacgggtgaaactttgcatgtgaacggcgggatgtacatggtctgaccgcgatttgcacaaaatgctcatgttgcgcgcagtctgcgtggttatgagtaataattagtgcaaaatgatttgcgttattggggggtaaggcctcaaaataacgtaaaatcgtggtaagacctgccgggatttagttgcaaatttttcaacattttatacactacgaaaaccatcgcgaaagcgagttttgataggaaatttaagagtatgagcactatcgaagaacgcgttaagaaaattatcggcgaacagctgggcgttaagcaggaagaagttaccaacaatgcttctttcgttgaagacctgggcgcggattctcttgacaccgttgagctggtaatggctctggaagaagagtttgatactgagattccggacgaagaagctgagaaaatcaccaccgttcaggctgccattgattacatcaacggccaccaggcgtaagtgaacatctccaggcggtcgttcgaccgcctgagttttatctttttgtcccactagaatcattttttccctccctggaggacaaacgtgtctaagcgtcgtgtagttgtgaccggactgggcatgttgtctcctgtcggcaataccgtagagtctacctggaaagctctgcttgccggtcagagtggcatcagcctaatcgaccatttcgatactagcgcctatgcaacgaaatttgctggcttagtaaaggattttaactgtgaggacattatctcgcgcaaagaacagcgcaagatggatgccttcattcaatatggaattgtcgctggcgttcaggccatgcaggattctggccttgaaataacggaagagaacgcaacccgcattggtgccgcaattggctccgggattggcggcctcggactgatcgaagaaaaccacacatctctgatgaacggtggtccacgtaagatcagcccattcttcgttccgtcaacgattgtgaacatggtggcaggtcatctgactatcatgtatggcctgcgtggcccgagcatctctatcgcgactgcctgtacttccggcgtgcacaacattggccatgctgcgcgtattatcgcgtatggcgatgctgacgtgatggttgcaggtggcgcagagaaagccagtacgccgctgggcgttggtggttttggcgcggcacgtgcattatctacccgcaatgataacccgcaagcggcgagccgcccgtgggataaagagcgtgatggtttcgtactgggcgatggtgccggtatgctggtacttgaagagtacgaacacgcgaaaaaacgcggtgcgaaaatttacgctgaactcgtcggctttggtatgagcagcgatgcttatcatatgacgtcaccgccagaaaatggcgcaggcgcagctctggcgatggcaaatgctctgcgtgatgcaggcattgaagcgagtcagattggctacgttaacgcgcacggtacttctacgccggctggcgataaagctgaagcgcaggcggtgaaaaccatcttcggtgaagctgcaagccgtgtgttggtaagctccacgaaatctatgaccggtcacctgttaggtgcggcgggtgcagtagaatctatctactccatcctggcgctgcgcgatcaggctgttccgccaaccatcaacctggataacccggatgaaggttgcgatctggatttcgtaccgcacgaagcgcgtcaggttagcggaatggaatacactctgtgtaactccttcggcttcggtggcactaatggttctttgatctttaaaaagatctaagttgtcattttccacccttataaaaggtccgcttgcgggccttttttcttagcttttattccgacttgttccgtagtgaacatgctgccacactaacaattctctgataaggagccggtatgttcttaattaacggtcataagcaggaatcgctggcagtaagcgatcgggcaacgcagtttggtgatggttgttttaccaccgccagagttatcgacggtaaagtcagtttgttatcggcgcatatccagcgactacaggatgcttgtcagcggttgatgatttcctgtgacttctggcctcagcttgaacaagagatgaaaacgctggcagcagaacagcaaaatggtgtgctgaaagtcgtgatcagtcgcggtagtggcgggcgagggtacagcacattgaacagcggaccggcaacgcggattctctccgttacggcttatcctgcacattacgaccgtttgcgtaacgaggggattacgttggcgctaagcccggtgcggctggggcgcaatcctcatcttgcaggtattaaacatctcaatcgtcttgagcaagtattgattcgctctcatcttgagcagacaaacgctgatgaggcgctggtccttgacagcgaagggtgggttacggaatgctgtgcggctaatttgttctggcggaagggcaacgtagtttatacgccgcgactggatcaggcaggtgttaacggcattatgcgacaattctgtatccgtttgctggcacaatcctcttatcagcttgtcgaagtgcaagcctctctggaagagtcgttgcaggcagatgagatggttatttgtaatgcgttaatgccagtgatgcccgtatgtgcctgtggcgatgtctccttttcgtcagcaacgttatatgaatatttagccccactttgtgagcgcccgaattagtcatgaaaaaagtgttattgataatcttgttattgctggtggtactgggtatcgccgctggtgtgggcgtctggaaggttcgccatcttgccgacagcaaattgcttatcaaagaagagacgatatttaccctgaagccagggaccggacgtctggcgctcggtgaacagctttatgccgataagatcatcaatcgtccacgggtttttcaatggctgctgcgtatcgaaccggatctttctcactttaaagccgggacttaccgctttacaccgcagatgaccgtgcgcgagatgctgaaattgctggaaagcggtaaagaagcacagttccctctgcgactggtagaagggatgcgtctgagcgattacctcaagcaattgcgtgaggccccgtatatcaagcatacgctgagcgatgataagtacgccaccgtagcgcaggcacttgaactggaaaacccggagtggattgaaggttggttctggccagacacctggatgtataccgccaataccaccgatgtcgcgttactcaagcgagcgcacaagaaaatggtgaaagcggtcgatagcgcctgggaagggcgtgcggacggtctgccttataaagataaaaaccagttggtgacgatggcatcaattatcgaaaaagaaaccgccgttgccagtgaacgcgataaggttgcctcagtatttatcaaccgtttacgcattggtatgcgcctgcagaccgacccgaccgtgatttacgggatgggagagcgttataatggcaaactttctcgtgcagacctggaaacgccgacagcgtataacacctataccattaccggtctgccgccaggtgcgatagcgacgccgggggcggattcgctgaaggctgctgcgcatccggcaaaaacgccgtatctctattttgtggccgatggtaaaggtggtcacacgtttaataccaatcttgccagtcataacaagtctgtgcaggattatctgaaagtgcttaaggaaaaaaatgcgcagtaagtatatcgtcattgaggggctggaaggcgcaggcaaaactaccgcgcgtaatgtggtggttgagacgctcgagcaactgggtatccgcgacatggttttcactcgggaacctggcggtacgcaacttgccgaaaagttaagaagcctggtgctggatatcaaatcggtaggcgatgaagtcattaccgataaagccgaagttctgatgttttatgccgcgcgcgttcaactggtagaaacggtcatcaaaccagctctggctaacggcacctgggtgattggcgatcgccacgatctctccactcaggcgtatcagggcggcggacgtggtattgaccaacatatgctggcaacactgcgtgatgctgttctcggggattttcgccccgacttaacgctctatctcgatgttaccccggaagttggcttaaaacgcgcgcgtgcgcgcggcgagctggatcgtattgagcaagaatctttcgatttctttaatcgcacccgcgcccgctatctggaactggcagcacaagataaaagcattcataccattgatgccacccagccgctggaggccgtgatggatgcaatccgcactaccgtgacccactgggtgaaggagttggacgcatgagatggtatccatggttacgacctgatttcgaaaaactggtagccagctatcaggccggaagaggtcaccatgcgctactcattcaggcgttaccgggcatgggcgatgatgctttaatctacgccctgagccgttatttactctgccaacaaccgcagggccacaaaagttgcggtcactgtcgtggatgtcagttgatgcaggctggcacgcatcccgattactacaccctggctcccgaaaaaggaaaaaatacgctgggcgttgatgcggtacgtgaggtcaccgaaaagctgaatgagcacgcacgcttaggtggtgcgaaagtcgtttgggtaaccgatgctgccttactaaccgacgccgcggctaacgcattgctgaaaacgcttgaagagccaccagcagaaacttggtttttcctggctacccgcgagcctgaacgtttactggcaacattacgtagtcgttgtcggttacattaccttgcgccgccgccggaacagtacgccgtgacctggctttcacgcgaagtgacaatgtcacaggatgcattacttgccgcattgcgcttaagcgccggttcgcctggcgcggcactggcgttgtttcagggagataactggcaggctcgtgaaacattgtgtcaggcgttggcatatagcgtgccatcgggcgactggtattcgctgctagcggcccttaatcatgaacaagctccggcgcgtttacactggctggcaacgttgctgatggatgcgctaaaacgccatcatggtgctgcgcaggtgaccaatgttgatgtgccgggcctggtcgccgaactggcaaaccatctttctccctcgcgcctgcaggctatactgggggatgtttgccacattcgtgaacagttaatgtctgttacaggcatcaaccgcgagcttctcatcaccgatcttttactgcgtattgagcattacctgcaaccgggcgttgtgctaccggttcctcatctttaagagagacatcatgtttttagtcgactcacactgccatctcgatggtctggattatgaatctttgcataaggacgtggatgacgttctggcgaaagccgccgcacgcgatgtgaaattttgtctggcagtcgccacaacattaccgggttatttacatatgcgggatctggtaggcgaacgtgacaacgtcgtattttcttgtggcgtgcatccactcaaccagaatgatccctacgatgtagaagatttacgccgtctggcggcagaagagggtgttgtagcgctgggtgaaaccgggctggattattattacacgccggaaactaaagtacgtcagcaagagtccttcatccatcatatccagattggtcgtgaactgaacaagccggttatcgtccatacccgtgacgcccgtgccgatacgctggcaattctgcgcgaagaaaaagtgacggattgcggtggcgtactacactgttttacagaggacagagaaacggcgggtaaattactggatctcggattttacatctccttttccggcattgtgaccttccgtaatgcggagcaactgcgcgatgctgcgcgttatgtccccctggatcggttactggtggaaactgactcaccttaccttgcgccggtaccgcatcgaggaaaagagaatcaacctgcgatggttcgtgacgttgcagaatacatggctgtgttgaaaggtgttgccgttgaagaactggcgcaggtaaccaccgataacttcgcccgtctgtttcacatcgacgcttcccgccttcaatccatccgttgaatgagtttttttaaagctcgtaattaatggctaaaacgagtaaagttcaccgccgaaaattgggcggtgaataaccacgtttgaaatattgtgacatatgttttgtcaaaatgtgcaacttctccaatgatctgaagttgaaacgtgatagccgtcaaacaaattggcactgaattattttactctgtgtaataaataaagggcgcttagatgccctgtacacggcgaggctctccccccttgccacgcgtgagaacgtaaaaaaagcacccatactcaggagcactctcaattatgtttaagaatgcatttgctaacctgcaaaaggtcggtaaatcgctgatgctgccggtatccgtactgcctatcgcaggtattctgctgggcgtcggttccgcgaatttcagctggctgcccgccgttgtatcgcatgttatggcagaagcaggcggttccgtctttgcaaacatgccactgatttttgcgatcggtgtcgccctcggctttaccaataacgatggcgtatccgcgctggccgcagttgttgcctatggcatcatggttaaaaccatggccgtggttgcgccactggtactgcatttacctgctgaagaaatcgcctctaaacacctggcggatactggcgtactcggagggattatctccggtgcgatcgcagcgtacatgtttaaccgtttctaccgtattaagctgcctgagtatcttggcttctttgccggtaaacgctttgtgccgatcatttctggcctggctgccatctttactggcgttgtgctgtccttcatttggccgccgattggttctgcaatccagaccttctctcagtgggctgcttaccagaacccggtagttgcgtttggcatttacggtttcatcgaacgttgcctggtaccgtttggtctgcaccacatctggaacgtacctttccagatgcagattggtgaatacaccaacgcagcaggtcaggttttccacggcgacattccgcgttatatggcgggtgacccgactgcgggtaaactgtctggtggcttcctgttcaaaatgtacggtctgccagctgccgcaattgctatctggcactctgctaaaccagaaaaccgcgcgaaagtgggcggtattatgatctccgcggcgctgacctcgttcctgaccggtatcaccgagccgatcgagttctccttcatgttcgttgcgccgatcctgtacatcatccacgcgattctggcaggcctggcattcccaatctgtattcttctggggatgcgtgacggtacgtcgttctcgcacggtctgatcgacttcatcgttctgtctggtaacagcagcaaactgtggctgttcccgatcgtcggtatcggttatgcgattgtttactacaccatcttccgcgtgctgattaaagcactggatctgaaaacgccgggtcgtgaagacgcgactgaagatgcaaaagcgacaggtaccagcgaaatggcaccggctctggttgctgcatttggtggtaaagaaaacattactaacctcgacgcatgtattacccgtctgcgcgtcagcgttgctgatgtgtctaaagtggatcaggccggcctgaagaaactgggcgcagcgggcgtagtggttgctggttctggtgttcaggcgattttcggtactaaatccgataacctgaaaaccgagatggatgagtacatccgtaaccactaatccgtaagacgttggggagactaaggcagccagatggctgccttttttacaggtgttattcagaattgatacgtgccggtaatgctgaaattacgcggtgtgccgtagacgatagaaccttccacgttggtatcgtaggttttgtcgaacaggttattgacgttcccctgtaacgagaagtttttcgtcacctggtagcgggtgaagagatccaccagcgcgtagctaccttgctcggcgcggaaggtgccatacggcgtcacggtgtcggtatacacgcgattttgccagttaacaccaccgccgaccgtcaactctggcatgacaggcaaccgatagctggtgaacattttaaccgtggtgcgtggcagattaggattaacggcgtttccttcgttatcctctgcaatatagcgcgttgcgccaaatgtcagctgccagttgtcggtaattgcgccgttgagttcaaattccacccctttactgactgtcccatccaccgctttataggcggtttcgccgttgctgccggggataggtgtaccggtggactgagcgacattatcctgctcaatacggaagatggctaacgtggtggtcagacggctattcatccagtccgatttcagacccagctcgtagttgttaccggtgattggagccagatatttgcctgaactgtcacgatcattttgcggctggaaaatagaggtatagctggcgtaggtcgaccagttgtcattgatgtcaaacaccagaccagcgtaaggcgtggtgtggtttttctccatgctgtaagtcagcgtatcaacccgccagttggtataacgtgcgccgaggatcagatgcagcggatcggcaagggtgacacgagtggcagcatataacgatttcatatgtgtggtatcgtcctgcgccaggctctgtggtgaccagtcggtttgtgggaaattgccattaaagttgtagaaactgccaatttcatccgggaagatgttggcccatgaactgaagtaacgattgttttgtttgctgtaactgccaccaaacattagattgtgctgacgaccaaacaattcataactaccgtcagcgaacaaatccagcgcatcaactttacgtttgccactgttccaaccggtgccgccgacataatcaaagccaggtccataattactgtatggcccaaccagcataccatccgctttgtttacataggcatcgacatacatcattttgctgtcaaattcgacttcagagtgggtggcattcagtgtcgcttgccaggtatcagcaaactgctgcttcagggtcataaagaccttgttgatctctttatcgttgtacgcccagtcaggtgcggtactgcgtgcgcgatcgtaactgttgctgctgccatcagtattccagcgcggtaaaccgccccaggtagggctattaacatcaatgcgctgatattcgtaaccggctgaaagcgtcgtaagatcgcctaaatcagcatcgacaatgcccgagaagaaggtcttttcactgttgtagcggtccagccatgagtcgttattctggtagccgccgacaattcgcgcgcggattttaccgtcttcggtgagtgggctttgtaaatccgccacataccgttctttgttccagctaccgtattccgccgagacatcgcctttaaattcacgactggtcgcgtgttttcgaaccatattaattgccgcagatggattacccgtcccggtcatgagtcctgtcgcgccacgcactacttctacgcgttcaaagagtgccatatcagaaagtgcgtcgcccagattccagcgcgattcaaaataggtggggataccatcaaccatatagttatcgatctggaatccgcgggaataataaagagcacgatcggaatccgcctgacttttgctgatccccagcgtgttttccatcacttcgcccagcgtttgtaactgctgatcttccatccgctgctggctaacaatagtgaccgactgaggaatatcacgttgagtcatctgcattttggtacccgcagaggtagacgttacgctgtaatcattttcgccatcatctggagctgtggctgaaccctcaacaatcaccgtttcttcagtggctggtgcagcaaaagcggcagaaggtaatagtgccagtgctatgcaaccggcaagtagtgacggtttggtgatggcttgatattgattatccctgttaaattgtgttgaaagcatttgaaatctcttggtttatgttgtcgtcaggctcatgccggaggagggtgatgagcgattatatttagtgtgcgaataattttgtttgtaaatgcaaatgagaaatatacgcattcatatttgtcatgtaaaccaaacagagaatgtcttttcagcgcattcgcaggcagaaatgggaataatggcgatatatacggcagcaaaacgattttttgcttaagaaatcgtgagttaaggttgaaagagcaggtttaactcgaccatactctatactcgcagtgtggcgcggcgtagcatggcgcaacgcatggctatttgaaaaaggaaaatgtcgtggcagaagaaactatattcagcaaaattattcgtcgtgagatcccctccgatatcgtctaccaggatgatctggtaacggcgtttcgcgatatttcgccgcaagcgccaacgcatattctgatcattccgaatatcctcattccgactgtgaacgacgtctcagctgagcatgagcaggcgctgggacgcatgatcaccgtagcggcaaaaattgctgagcaagaaggtattgccgaagatggctatcgtctgatcatgaataccaaccgccatggcggacaagaggtttaccacatccatatgcacttgttgggtggccgtccgctgggaccaatgctggcgcataaaggtctgtaacgatgagaaaaggatgctttgggctggtgtctctggtgttgttactgctggtgggctgtcgttcacatccggaaattccggtgaatgatgagcaatcgctggtgatggagtcatctttattggctgcgggcatcagtgcagaaaagcccttcctttcgacgtctgatattcaaccttcagcatcctcaacgctttataacgaaaggcaagaacccgttaccgttcattatcgtttttactggtatgacgccagagggctggagatgcatcctctggaaaggccacgcagcgttaccattcccgcacattcggcggtaacgctgtacggcagcgccaattttctgggggcgcacaaagtcagactttatctatatttgtaaggggtgaatcttgatgacaaaaatgagtcgctacgccttgattaccgcgctggcgatgtttctcgccgggtgtgtggggcaacgtgaacctgcaccggtagaagaagtgaaaccagcgccggaacaaccagccgagccacaacagcctgtccccacagtgccctcggtgccgacgatcccgcagcagccaggcccaattgagcacgaagatcaaactgcaccgcctgcgccgcatattcgccattatgactggaatggcgcaatgcagccgatggtcagtaagatgcttggggctgacggggtgactgcgggtagcgtcctgctggttgatagcgttaacaaccgtactaacggttcgctgaatgccgcagaagcgaccgaaacgctgcgaaatgcgctggctaataacgggaaatttaccctggtttccgcccagcaactgtcgatggcgaagcaacagttaggtttgtcgccgcaggacagtttaggcacccgtagtaaagccataggcattgcccgcaatgtcggcgctcattacgtgctgtactccagcgcctctggcaacgttaacgctccgaccctacaaatgcagctgatgctggtgcagacgggcgaaattatctggtcaggtaaaggtgccgtttcgcagcaataatcccatcacgcgcgacgaattgctgtcgcgctttttcccgcagtatcatcccgtcacgacgtttaatagtgggcttagtggcgggagttttctcattgaacatcagggccagcgttttgttgtgcgtcagccgcacgatcctgatgcgccgcagtccgcgttcttgcgccagtatcgggctttatcacaactacccgcatgcattgcaccgaagccgcatttatatctccgtgactggatggtagtcgactatctgcccggcgcggtaaaaacgtatttgccggataccaacgaactggcaggcttgctgtattatctacatcaacaaccacgttttggctggcgaataacgctgttgccgttactggaactgtactggcagcaaagcgatccggcgcggcggacagtgggttggctgcgaatgttaaaacgtctgcgcaaagcgcgggaaccacggcctttacgcttaagtccattgcatatggatgtccacgccggaaatttagtgcatagcgcgtcagggttaaaactcatcgactgggagtatgccggagatggtgatatcgcgctggaactggcggcggtgtgggtggaaaatactgaacagcaccggcaattggtcaatgactatgccactcgcgcgaagatttatccggcgcaattatggcgtcaggtcaggcgatggtttccctggctgctgatgctcaaagcagggtggtttgagtaccgctggcgacaaaccggcgatcaacaatttatcaggctggccgatgacacctggcggcagctattaataaaacaataaggagagcagtgtgggtccagtaatgttggatgtcgaaggttacgaactggacgcggaagagcgtgaaatactggcgcatccgctggtgggagggctgattctctttacgcgtaactatcatgatcctgcccagttacgtgaactggtgcgccagatccgcgcagcttcgcgcaatcgtctggtggtggcggttgatcaggaaggtggacgcgtgcagcgttttcgtgaaggttttacccgcttgccagcggcgcaatcattcgctgcgctgtcaggaatggaagagggtggcaaactggcgcaggaggcaggttggttgatggccagcgaaatgatcgctatggatattgatatcagctttgcgcctgtgctggatgtcgggcatatcagcgcggcgattggcgagcgttcttatcatgccgatccacaaaaagccctggcaattgccagccggtttattgatggtatgcatgaagccggaatgaaaacgaccgggaaacacttcccaggacacggtgcagtaacggcagactcacacaaagaaacaccgtgcgatccacgtccacaagcggagattcgcgctaaagatatgtcggtcttcagttccttaatccgcgaaaataaactcgacgccattatgcctgcgcatgtgatctacagtgatgttgatccgcgtccggcgagcggttctccctactggctgaaaaccgttttgcgtcaggaactgggttttgacggcgtgattttctctgacgatttatcgatggaaggtgccgcgattatgggcagttatgccgaacgcgggcaggcttcactggatgcgggttgcgatatgatcctggtctgcaataatcgtaaaggggccgtcagcgtgttagataatctgtcaccgatcaaggcagaacgtgttacacgtttgtatcataaaggttcattttcgcgacaggaactgatggactcggctcgctggaaagcgatcagcacccgtctgaatcagttacatgaacgctggcaggaagagaaagcaggtcactaaccctggcttatgtgaggaagcgatgattatctatttacacggttttgactctaacagtccgggtaaccacgagaaagtcttacaattgcagtttattgacccggatgtacgcttgataagctacagtacgcggcatccgaaacatgatatgcagcatctgcttaaagaagtggacaaaatgttgcaactgaacgttgacgagcgtccgctaatttgcggcgttggcttgggcggatactgggcggaacggattggttttctttgcgacatccgccaggtgatcttcaaccctaatttgttcccttatgagaacatggaaggcaagattgatcgcccggaagagtatgccgatattgccactaagtgtgtgaccaacttccgtgagaagaatcgcgatcgttgcctggtgattttgtcgcgtaatgatgaagcgcttaacagccagcggacatctgaagagttgcatcattattacgagattgtctgggacgaagagcagacgcacaaattcaagaatatctccccgcatttacagcgcattaaagcgttcaaaaccctcgggtaaatgccctcgtcgcatcaggtaaccttgccggtacctgatgcgctccgaattctgtgggtcggataaggcgtccacgccgcatccgacagtcgagcatcaatgcctgatgcgcttcttatcaggcctaccgaacgccctgcatacacccctcactctatatcactctcacaaattcgctcaaataataaacaataaactctgttttttgatctcacccggtaaagtcgcctatcttttcagcaacaaaacttgattaacatcaattttggtatgaccaatgcaccattcatgttattctcaatagcgaagaacattttcattgctgtaacctgttgttaattaagagctatgttaataaccattaattaacaattggttaataaatttaagggggtcacgttgactacgccattgaaaaagattgtgattgtcggcggcggtgctggtgggctggaaatggcaacacagctggggcataagctgggacgcaagaaaaaagccaaaattacgctggtcgatcgtaaccacagccacctgtggaaaccgctgctgcacgaagtggcgactggctcgcttgatgaaggcgtcgatgcgttgagctatctggcccatgcgcgcaatcatggtttccagttccagctgggttccgtcattgatattgatcgtgaagcgaaaacaatcactattgcagaactgcgcgacgagaaaggtgaactgctggttccggaacgtaaaatcgcctatgacaccctggtaatggcgctgggtagcacctctaacgatttcaatacgccaggtgtcaaagagaactgcattttcctcgataacccgcaccaggcgcgtcgcttccaccaggagatgctgaatttgttcctgaaatactccgccaacctgggcgcgaatggcaaagtgaacattgcgattgtcggcggcggcgcgacgggtgtagaactctccgctgaattgcacaacgcggtcaagcaactgcacagctacggttacaaaggcctgaccaacgaagccctgaacgtaacgctggtagaagcgggagaacgtattttgcctgcgttaccgccacgtatctctgctgcggcccacaacgagctaacgaaacttggcgttcgcgtgctgacgcaaaccatggtcaccagtgctgatgaaggcggcctgcacactaaagatggcgaatatattgaggctgatctgatggtatgggcagccgggatcaaagcgccagacttcctgaaagatatcggtggtcttgaaactaaccgtatcaaccagctggtggtggaaccgacgctgcaaaccacccgcgatccagacatttacgctattggcgactgcgcgtcatgcccgcgtccggaagggggctttgttccgccgcgtgctcaggctgcacaccagatggcgacttgcgcaatgaacaacattctggcgcagatgaacggtaagccgctgaaaaattatcagtataaagatcatggttcgctggtatcgctgtcgaacttctccaccgtcggtagcctgatgggtaacctgacgcgcggctcaatgatgattgaaggacgaattgcgcgctttgtatatatctcgctataccgaatgcatcagattgcgctgcatggttactttaaaaccggattaatgatgctggtggggagtattaaccgcgttatccgtccgcgtttgaagttgcattaatcgacgtacactggcggatgtggcataaacgcctcatccgcccttgaggaacagcgcgatcggcagccgcgttgtatcaggcatcctttcagactcctccgaatccttaagtatttccagccattcccgcgcttttcatcttctgtctgatagctgcttttctccttcgcttgcatgattggcataactgcaaagaaggaggtgttcccgtgaataaatcaatgttggcgggtatcgggattggtgtcgcagctgcgctgggcgtagcggcagtggccagtctgaacgtgtttgaacggggcccgcaatacgctcaggttgtttctgcaaccccaatcaaggaaacggttaaaacaccgcgtcaggagtgtcgcaacgtcacagtgacccatcgtcgaccggtgcaggatgaaaatcgcattaccgggtcggtgctcggcgctgttgctggcggcgtgatagggcatcagtttggtggtggtcgcggtaaagatgtcgccactgttgtgggggcgctgggtggtggatatgccggtaaccagatccagggctctctccaggaaagcgatacttacacgactacgcaacagcgttgtaaaacggtgtatgacaagtcagaaaaaatgctcggttatgatgtgacctataagattggcgatcagcagggcaaaatccgcatggaccgcgatccgggtacgcagatcccgctagatagcaacgggcaactgattttgaataacaaagtataacaaggctgtactctgcaatttggcccctcattcgctcaggctgaggggctttttttgcgacttatttcaccagttcgggccataaacgcaaagtcgttccggcaatctgcatcagtttttccagcgatgcaccttcgcgtgcgctgatcgacatcccctgaataatacaattaaggaattctgccagatgtgtcacgtcacagtggggcgggatttccccgcgcgcttgtcgttgacataaaaactgctgcaaagtgcgctcttgcatcgcatggcgtgatttcaacgtattggcgatatctcctgaatctggggagagggtggtgcagttgttgatcatgaagcagcctgccggggtgtctttgctggtaaagcagttggcgatggcagcaaaatagtcagccagcgcagactccacgcttttctcttcacaaaacagctgtgcttcatgcttagcggcaaaacgatcgatatagcggtcgagaacggcacgaaataacccctctttgttggtaaattccgcgtatagcgtgggcgctttggctccggtcgcttcgacgaggtccgcaagagaagtcgcttcataaccgtgttgccagaacaatttcatggccttatcaagcgcggcatccctgtcgaacacttttgggcggccacggcttttttttacacattgtgttgagtcagttgccatgatgccgttgtacctggtgactgtgaatgaaaggttattataaaaataatcacctccgttcaccagtccagatcccataaaaataattgctttctatttaactgaaatttaaagatttttaaattaattaatgattgttataaaaaatatcttgtatgtgatccagatcacatctatcatttagttatcgatcgttaagtaattgcttgcgacgtcattcatctgcataaggccactattatgaaaaacgtaaaaaccctcatcgctgcggcgattttaagctccatgtcatttgccagctttgcggctgtcgaagttcagtcaacgccagaaggccaacaaaaagtcggtacaatcagtgctaacgcggggacaaatctgggatcgctggaagagcagctggcgcaaaaagcggatgagatgggcgcaaaatctttccgtattacttctgtaaccggtccgaataccctccatggaacagcagtaatttataaataagcattaaccctcattaatgcctgctactgctgattttttccccgcgacatgccgtgtcgcggggatttttttatccgggctttacagcgtttgtgggctcacttgatgacggcggacatccaccggcatcccggaacggacatccatcacatgttgcatcacttcagcgtcagtttgtgctgcatctttaaatgattgcattgcgctattcagcgtaattggcagcagctgcggatcgtcatcaatcttctctgacagcggctgatgtacttcaaccagacgcgcaccgtttggttcggcagagacttttatcggagtgttgatgatattcactttggtgcctggggtgacctggctaaagagtgttttgatatcgtcatcccgcagacgaatacagccagaacttacccgcatgccaatgccgaaatcggcgttcgtaccatgaagcaaataaacgccgccataggccgccagacgaatcgcatgatggcccattgggttatccggtccagccggcactaccgcaggcaactcaattccctgtgctttataacgggcgcggatgtttgccgttggcgtccaggttgggtttgcacgtttgtctgaaacggtggtcaccattgtcggtgtcagcgtgtcaccacctaactgaccaatacctattggatacacggttaccgaatttttacccggcgggtagtaatagagacgcagctccgcaatgttgatcacaatgccttcgcgcggcgcatctggaagtagggtttgcaacgggatcgttaacacgctgcccgcgcgcggtacgtaaggatcaacgccggggttagcctgtaacagagcgagaaagccgacgttgtattttttggcgatggcttccagagaaccaccgtcattttccaccacatgaaatttgttttcgccaaccagacgactgcccgctggcggcagcggccaggtgttggcttttgccggtagcgccagcgccacggcagcggcgaacgtaaaaaacgttagccagcgagaaaaacgcgttttgatcatcaccaaaaatccataataaatataaggttattgtaataaacagataagcctgaattatggatggtgacagtgtcggatagtgcagggaagtgcaaagaatttgtaaatgttgcagatgggggcgcagaaacgcccccgatttaccattaagcgatcgcgttctcttccagttcacgcataaactggcgtacccattcgatacgcgttttccgctcactcaaatcctgaataaatttcaggcgcgtcggaccatcaaggcggtaatgctgcggctgtttttgcagcaaaccaatcaaccaggccggattaacgtgattcttctcggcaaattcgatcaccccgcctttctcattaccttccagcttcctgatccccagtttctgcgcttgctggcgcagacgggcaatatccagcagggtacgcgccggatctggcagcaggccgaagcgatcgataagctcgactttgatctcttccagttcgttttccgttttggcgctggcaatacgtttgtagaacgacagacgcgtgttcacgtcagggatgaaatcatctggcaatagcgacggcatccgcagctcgacttctgtttgctggctggtgagatcttccagcgacggctcgcgtccggctttcagtgcatcgacggcgttttccagcaactccatatacagcgagaaaccgatggtttccattgagccgctttgttcttcgccaagcagttcacccgcgccgcgaatctccagatcgtgcgttgccagcgcaaaacctgccccgagatcttccagcgaggcaattgcttcaagacgtttttgtgcatcggtagtcatcgcttttggatgcggtgtcagcaaccatgcatatgcctgatgatgcgaacgtccgacgcgaccgcgtaactggtgcagctgcgccagaccgaagtgatccgcgcgttcaatgataatagtgttggctgtcgggatgtcgatcccggtttcgataatggttgtacaaaccagcacgttgaaacgttgatgatggaaatcattcatcacccgttccagttcgcgctcgcgcatctgcccgtgaccgatggcgatccgcgcttctggcaccagttctgccagccgttcggcggctttctgaatgttttccacatcattgtagagataataaacctgtcctccgcgcaaaatttcacgcaggatcgcctcccggaccaccatgctgtcatactcacggacaaaggttttaactgccagacgacgggcgggcggcgtggcgataatcgacaggtcacgcattccgctcattgccatattcagcgtacgtgggatcggcgttgcagtaagcgtcagaatatccacgttcgcgcgcatcgctttaatgcgctctttatgacgcaccccgaagcggtgttcttcatcgacaatcagcaggcctaaatctttaaacttgacgtcactttgcagcagtttgtgcgtaccgatcagaatatcgattttcccttccgccacttccgcaaggatttgcgtctgctctttggcgctgcggaaacgggagatcatttcgatacgtaccggccagttggcgaaacggtcgcggaagttgtcgtaatgctgctgcgcgagaagggtggtaggcaccagcaccgccacctgcttgtggttatctactgccaggaaagctgcgcgcatcgccacttctgttttaccaaagccaacatcgccgcacaccagacgatccattgccagcggctgacacatgtcgctaagtaccgcattaatggcctgcgcctgatccggcgtggtttcaaacgggaagctgtcgcagaacaactgatactgctcacgatcgtgtttaaacgcgaagccctctttggcggcgcgttgcgcgtagatatccagcaattccgccgccacatcacgcactttttccgccgctttctgccgcgcgcgtgaccacgcatcgccgccaagtttatgcagcggggcgttttcttccgcgccacctgcgtaacggctaatcagatgcagtgacgacaccggaacatacagtttggcgtcgttggcataggtgagcatcagatactcgccagtaatgccacccgcttccagcgtggtcattccggcataacgaccgacgccgtgctccagatggaccaccggctgaccaatatgcagttccgcaaggttacggatcagtgtatcggggttgatggtgcggcgagaatcctgacgacgacgggcaacgcgttcaccgagcagatcgctttcgcaaatcagcgccagattacgcaccgtatcgacaaaaccatgttcggcagcgccaatcatcagataacgcccacggtcgctggcttcatcaagacgcataatgcgttgcggagcaattttaattcgtgcgagcagttcacccagcgcttcacggcgaccttcactttctaccgagaacaccaccggaccgtcgaaagtctcgaggaacttacgcagcgcatccagcggcgctttttgttgtgcctgaacggccaggtctggcagtttctggaaacctaaattggcattcgcggcttttgtcggtaaatgttcagtttttagctgcacccggggccagtttttcagctctgagaagagctcgtccacccgcagccagagcgattgtggtggcaacagcgggcgcatcggatcgacgccgcgattctcaaaacgcgccagcgtgtcagcctggaaacgttcggcactggtttccagatcgccagtattcacgagcaaggtattggcagggaaataactgaacagcggcggcagtggttcgctgaagaacaatggctgccagtactcgatcccggcaggtaatgtgcctttactcacttgctggtaaatatgttctggatcgcgcttcacttcgaaggtatcgcgccactggctgcggaacagttcaattgccgctttatcggtcggaaattcgtgcgcgggcagcagattgatcgcttctacttcctccagcgtgcgctggctgtcgacgtcaaacacccgcaggctgtcgatttcatcatcaaagaaatcaagacgataaggcagctcactccccatcgggaagagatccagcaacgcgccgcgcgtggcgtattcgccgtgctccatcacctggtcaacatggcgataaccggcgctgtccagttgggttcgtaatgcatctcgtgacaggcgctgaccttttttcatcaccagcgcatgaccgtggagaaaactgtgtgggcaaacgcgctgcataagcgtattcaccggaacaatcagtacgccacgctgcatcgtcggtagctggtaaagggtggaaaggcgcgaggagataatgtcctgatgaggcgaaaaactgtcgtagggaagagtttcccagtccgccagattcatcaccatttgatcggtaaactggctgatttcatcatgcaaacgcagagcattttgcatatctggtgcaatgagtaccaccggaccggcgtgacgttcggcaatttccgctaccagcgttgcacaggctgcgccggttaactcgcccagcagacgctgctcacccgctttgacgggcagcgtataacgatattgttcaggcataacggttgtcagattctcgttaggatatgcctcaacatatgggggcatatctctgataagcaatgctgttcattatccgtaatcgacatggtttagcaaattgaatcgccccggctggggcgatggcttagcgggagtaactgacggcagcgggcagtgaaggcggggagaacaacagatcgctgaatgcacgctgtgaaagttttcttaccagcaagcccgcaacagtacagatgaacaaactgacaaagggataaaccagcaggagtgtcagttcgacttgcggcgaccagcgtgctgcgttcatttgcgcaagcagagttaagctgaatatttcaaccagaatgcgatgggtggtgtagatagcaatggtgttggagccaatcacattcagcaggctggtggagcgcataccgaatcgttgctcgtattgataaaacagcttcatgatcaccacaatcgataccagcgacaacagcagcgagatagtaaacaaccaggcaccgaccgccagaacggtaagcaaagaagccatcagcagatggcggcgcaacggcacctctttaacacaggtcattattgttgcgccaaaccatgcgccaaggctgtaataaggcaaattgcggatcacactgttcattccccaccacggcgtgggaacgaaattaaccgccacactcagcagtacaaacaaggcgaatagtggcagcgccagacggctaaaaattttacataccacgaaatagacaattaacgcatacagataccacaagctggtgctggcggtgatcatcccgtgcaggaactcaccggtggaatcggcataagcggcattggaggcattgcttaaatcgcgctcaggtgccagccactggttcagcgcacttaacgccagccactgcaccacgccccaaagcgccagcacccagaagatgttccagatccgtttatcgagacaatttccccacggtacgctgtcgatatagcggcgaatcaaatagccggatataaagaaaaaaaccggcatacgaaagggggcaaggtaaagattgaaatagatccagcatttgctcaggacttccgataacggatgctgaaaagtggtcagatgcggataaaaggtaatgaccgagtgataaatcaccaccagacaaatacataaccctttgatctggttaatccatagctctttttgtttcatcaggacaacacgctcttttttaatttacatgcggttgatcctgcgggttatgacccgaggtgtaatgggtatctgtctgtattggatgatttttcagattaagatcaggcggcaagattgatgataaaacatggcaatttagccgattgatttacgggggcttttcagattagccctgacgatcacttacagttcagacgtttacccatcttgctttcgcttatatactcgtgtctttgctacagcaaccagacggatttcatgtaccaacctgtcgctctatttattggcctgcgttacatgcgtgggcgtgcagcggatcgcttcggtcgtttcgtctcctggctttctaccatcggcattaccctcggggtgatggcgctggtcacagtattgtcagtgatgaacggctttgagcgcgagctgcaaaacaacatccttggcctgatgccacaggcaattctctcttctgagcatggctctcttaacccgcagcaactcccagaaacggcagtcaaactggacggcgttaatcgcgtcgcacctattactaccggtgatgtggtactgcaaagcgcgcgcagcgtggcggtcggggtgatgctcggtatcgacccggcgcaaaaagatccacttacaccgtatctggtcaatgtgaaacaaactgacctcgagccggggaaatataatgtcatcctcggcgaacaacttgcctcacagctaggcgttaatcgcggtgatcaaatccgcgtgatggtaccatctgccagccagttcacgccgatggggcgtattccaagccagcgcctgttcaatgtgattggcactttcgccgccaacagtgaagtcgatggctatgaaatgctggtgaatattgaggatgcctcgcgtctgatgcgttatccggcaggcaatattaccggctggcgtttgtggctggatgagccgctgaaagtcgactcattaagtcagcaaaaactgcctgaaggcagcaaatggcaggactggcgtgatcgtaaaggcgagttgttccaggccgtacgcatggaaaaaaatatgatgggtttactgctgagcctgattgtcgccgttgcggcgtttaacattattacctcactagggctgatggtaatggagaagcagggcgaagtagcgatcctgcaaacgcaaggcttaactccgcgacaaatcatgatggtctttatggtgcaaggggccagcgccgggattatcggtgcgatcctcggagcggcgcttggcgccctgcttgccagccagttaaataatctgatgccgataatcggcgtcctgcttgatggcgcggcgctgccggtggctatcgaacctttacaggtcattgttattgcgctggtggcgatggctatcgcgctgctgtctacgctttacccttcatggcgcgctgccgccactcaacccgctgaggctttacgttatgaataagatcctgttgcaatgcgacaacctgtgcaaacgctatcaggaaggcagtgtgcaaaccgatgtgctgcacaatgtcagtttcagcgtcggcgaaggtgaaatgatggcgatcgtcggtagctctggttccggtaaaagtaccttgctgcacctgctgggcgggctggatacgccaacctccggcgatgtgatttttaatggtcagccaatgagcaaactgtcgtcggcagcgaaagctgaactgcgcaaccagaagctgggctttatttatcagtttcaccacctgctgccggattttaccgccctggaaaacgtggctatgccgctgctgattggcaagaaaaagcccgctgaaatcaacagccgtgcacttgagatgttaaaagcggtggggctggatcatcgtgcgaatcaccgcccatctgaactttctggcggcgaacgccagcgtgtggcgattgcccgtgcgctggtgaataacccgcgcctggtactggcggatgaacctaccggtaacctcgatgcgcgtaacgccgacagcatcttccagttgcttggggaattgaatcgcttgcagggcaccgccttcctggtggttactcacgacctgcaactggcgaaacgtatgagccgccagttagaaatgcgtgatggtcgtctgacggcggaactgagcctgatgggggcggagtaatggcgatgcctttatcgttattaattggcctgcgttttagtcgcggacggcggcgcggcggcatggtgtcgctgatctccgttatttctaccattggcattgccctcggcgtggcggtattgatcgtcggcttaagcgcgatgaacggctttgaacgcgaactgaacaaccgtattctggcggtggtgccgcatggtgaaatcgaggcggtggatcagccgtggactaactggcaggaagcactggatcacgtgcaaaaagtgccgggtattgccgctgccgcgccgtatatcaatttcaccgggctggtggaaagtggcgcgaatcttcgcgcaatccaggtgaagggcgttaacccgcaacaggaacagcgtctgagcgcattaccctcgtttgtccagggcgatgcgtggcgcaattttaaagcgggcgaacagcaaattatcatcggcaaaggcgtggcggatgcgctgaaagtgaagcagggggattgggtgtcgattatgatccccaactcgaatcccgagcataaactgatgcagccaaaacgtgtgcgtttgcacgttgccggtattttgcagttgagtggtcaactcgatcacagttttgccatgatcccgctggcggatgcccaacaatatcttgatatgggttccagcgtgtcaggtattgcccttaaaatgacggatgttttcaacgccaataagctggtacgcgatgcgggtgaagtgaccaacagctatgtttatattaaaagctggattggtacttacggctatatgtatcgcgatatccaaatgatccgcgccattatgtatctggcgatggtactggtgattggcgtggcctgtttcaacatcgtctccaccttagtgatggcggtgaaagacaagagtggcgatatcgcagtattaagaacgctgggggcgaaagatggtttaattcgcgccatctttgtctggtatggattgctggcagggctgttcggcagcctgtgtggtgtgattatcggcgtagtggtttcactgcaacttaccccgattattgagtggattgaaaagttgatcggtcatcagttcctctccagcgatatctattttattgatttcctgccatcggaattgcactggctggacgtcttctacgtactggtcacagcattgttgctgagtcttttggcaagttggtatccggcgcggcgcgccagtaatattgaccctgcgcgagtccttagcggccagtaaaggcagtacattaaaacaaggagcggcaatgtattacgggtttgatattggtggaacaaaaattgcgcttggcgtgtttgatagcggtcggcagttgcagtgggaaaagcgggtgccgacaccgcgtgacagctatgacgcatttttagatgcagtgtgtgagctggtagctgaagctgaccaacgttttggctgtaaaggttctgtcggcatcggtattccgggaatgccggaaacagaagatggtacgctgtatgccgccaatgtccccgctgccagcggtaaaccgctgcgtgccgacctgagcgcacgtcttgatcgcgatgtacgccttgataacgatgccaactgttttgccctttcagaagcctgggatgatgaatttactcaatatccactggtgatggggttgattctcggcaccggtgttggcggcgggctgattttcaacggcaaaccgattaccggtaaaagctacattaccggcgagtttggccatatgcgtctgccggttgatgcgttaaccatgatggggttggatttcccgttacgccgctgcggctgtggtcagcatggctgcattgaaaattatctgtctggtcgcggttttgcgtggctgtatcaacactattatcatcaaccgttgcaggctcccgaaattattgcgctttatgatcaaggcgatgagcaggcaagggcgcacgttgagcgttatctggatttattagcggtttgtctgggaaatatcctgaccatcgttgaccctgacctggtcgtcattggtggtggcttatcgaatttcccggcaatcacaacgcaactggcggacaggctgcctcgtcatctcttacctgtagctcgtgttccgcgcattgaacgcgcgcgccacggtgatgcgggaggaatgcgtggtgcggccttcctacatctaaccgattaaacaacagaggttgctatgctgtcgcgtcggggtcatcggttaagtcgttttcgtaaaaataaacgccgcctgcgcgagcgtttgcgtcagcgtatttttttcagagataaagtggtgccggaagcaatggaaaaaccaagagtactcgtactgacaggggcaggaatttctgcggaatcaggtattcgtacctttcgcgccgcagatggcctgtgggaagaacatcgggttgaagatgtggcaacgccggaaggtttcgatcgcgatcctgaactggtgcaagcgttttataacgcccgtcgtcgacagctgcagcagccagaaattcagcctaacgccgcgcatcttgcgctggctaaactgcaagacgccctcggcgatcgctttttgctggtgacgcagaatatcgacaacctgcatgaacgcgcaggtaataccaatgtgattcatatgcatggggaactgctgaaagtgcgttgttcacaaagtggtcaggttctcgactggacaggagacgttaccccagaagataaatgccattgttgccagtttccggcacccttgcgcccgcacgtagtgtggtttggcgaaatgccactcggcatggatgaaatttatatggcgttgtcgatggccgatattttcattgccattggcacatccgggcatgtttatccggcggctgggtttgttcacgaagcgaaactgcatggcgcgcacaccgtggaactgaatcttgaaccgagtcaggttggtaatgaatttgccgagaaatattacggcccggcaagccaggtggtgcctgagtttgttgaaaagttgctgaagggattaaaagcgggaagcattgcctgatgcactacgcttatcaggcctgcaaggggacgcaattaattgaatttgcgggttttgtgggccggataaggcgttcgcgccccatccggaataatacacgcgcacttttccggcctcttttatcgtttactcgtcaataacaatgcggcaataaacgtacagacaccaattagccctgcccagagtggcgatattctggtaatcgcaaagctattatcgatatacaaacataaagcctgataacccatattggcaatagtcatcgccactgcaaattttaacgcataaataaaacgagtcgtgtagtaaaagatcctggaaaataagataaacgtcgcagcccaggcgataaaacctaatgtgttggtgctgccggggggagcattttcatgctgttgtcctggatgcggataatacgttagtggcggcgtcgattgttttaatatctgtgcttgtagaacagccaatgcattattgattccctgataccagagatctgcatttaaataagccagcgtgtgattttctatcagaaggccgagatgtttatcgtccagaccactttcaacctggccgttggtgatcataattaaccgtggttcgcgggtagtaaatagtaacagaacacttccttttacatcactcaatgaagatgacgcatgcgccagcatcgctttaccattttgtctgagactggcttcattattaatgtcgggtaaaaccacaataaacggtgcaattcccgtttgttggcgaaaaagctcggctttatgcgcgatctcttcagcatctggtacagtaccggtaacgtccgtaaaaagtgtcttcattattggaattaatggcttgctggctgctgtcagaggcaggagtatcagtaaactgagcagtataatgaattttttcatgggcgggacttccgtttcctgcgtgattttttagaggagggcatacttattaataaaccgacggcgataaaaataacgcccataatgccgataaacccccatttaaaaaaattaacccacgggttatttatctcagccttttcaggatgcccgggagaataataaacattaactttatcgccttcgctgtcttcataaaaatcgctgccgatactcgaattgaaaattagcgtgtaatctggcgtcggtcgaaaggcaacgacgggataccacgaaccatctttacccgtgcgatgagaatgactggagtgccagacggtatcaacaatgacgccttcggtatgaatcgcgtctttgctataggtgaactggttataaaagacaacaacagaaatgaggatcagtaccagaccgataccgaggaatatacgaaagaaaactttactgtcctgactcattagccacatccttgctaactaaaaaacgggcggtaataccaccgcccgcttgctgaattaacgtcctgctttcagcttctgataatactcttcataaatgctgctggctgcgccaacgtcattctgccattcgccatttttaatggtttcagcatccgggtagagtgttttatcgttcgccacttctggacttaacagcttacgcgccgcaaggtttggcgttggataaccgatagtttcagcaacctgttttgccacatccgggcgcagcaggaagttgatcaatttcagcgcgccttctttgtttttggcatttgccgggatcgccaggctgtccatccagaaaatgccgccttctttcggccacaccacgtcaattggcgtacccgcctggcgtgcaacgaaagcagaaccgttccagatcatgccgaggttaacttcgccttccatgtacgggttcgccgggttatcggagttaaaggctgccacgtttggcatcagttttttcagctcgttatatgcagcttcaatctctttcggatcggtggtgttaccggagtagcccagcttacgcagcgccatctggaacacttcacgggcatcgtcggtcaacagcaggctgcctttgtactctggcttccacagatcggcccagctggtgacagatttcggatccaccgcatcaccgttaacaccaatcgccgtcgcaccccagatatacggaatggagtagtcgttattcgggtcaaaaggcttgttgagcatgtctggatcgagattgctgaagtttgttaacttcgacttgtcgatcttctggatcatcccttctttacgcattttatcaacgtaataggttgaaggaaccaccagatcataggcaccgtctttgtatgttttcagcttggcgtacatggtttcgttcgactcgtaagtcgaatagataaccttaataccggtttctttggtgaactgttcaagcagtcctggcggcacgtactcggtccagttgtagaaatacagcgtgttgttgtcatcggcgtgagcggcgctcatgcccagtgccagagcacccgccgcgagcaggtggcgtgaccattttttcatttaacgtcccctgtgttacctttcgttttatcacgagcaataagctggctggcaataaccatcaccagcgacagcaccagtaatatggttgccagcgcgttaacttccggcgatacgccgactttgaccatcgaataaatttttaacggcagaatttcataacttggtccggtgacgaacgaagaaactaccacatcgtccatcgacagggtaaagcttaacacccagcccgccgccaccgctggcattgccagtggcagaatgatttttcgcagaatggtaaattcgctggcaccgagatctttcgccgcttccagcattcgcacgtcaaaacctttcaggcgcgaatacaccgtcaccaccacaaatggcaggcagaaggtgatatgcgagaacagcagcgaccagaagccaagctgaatacccagcagcataaacagcaccagcagcgaaatcgccatcacgatatctggtgacatcatcaccacaaacagcattccgctaacgaacggcttaccacgaaagcgataacggtacagcgcaactgccgtcagtgaaccgataagcgtagcaaacgtcgccgaaaacaccgccattgttagtgaatgctgcgctgcctgtaacaggctgtcgttgttcatcagcaggctataccatttggtggtaaagccctgccagttgatgccaaagcgcgagctgttaaaggagttcacaatcaaaataatgattgggatatacaggtacgcgtagatagcggtcataaaaccgccgcgaagcagtcgaccgatcattcgagttccaccttcttattcagcaaacgagaagcgcgccagtaaaccagcaacatcaggcccattacgatagtcagcgtaatgctggtagctgcaccaaacggccagtcacgaatattaaggaactggaccttgatgacgttaccgatcagcaggtttttcgcaccgcccatcaggtcggatacatagaacaggcccatcgctggcagcatcaccagcagacatccggcaataattcccggcatcgtcagtggaataatgatacggataaaagtctgtaacttgctggcaccgagatcgcgcgccgcctcaagcaacggcttatccagtttttcgatactggagtacagcggcatcaccataaacggcagcagaatgtaaaccagaccgataatcaccgcactgggcgtgaacatgatacggattggtgtgtcgataacgcccagccagagcaaaaactcgttgagatagcctttggtgctgaggaaaattttcagcccgtagatacgaattaatgagttggtccagaacggaacaatcagcagaaacagcagcagcggacgcaccttgtgtggcaacttcgccagaaaccaggcaaacgggtagcccagcaccaggcaggcgagggtggcgatcagcgccatattcagcgagtgcaatagcacttcaaaatagagcggatcgagcagacgcgtgtagttatccagcgtaaagaccattttgacaaaactggcgtcgtcgcgggtcaaaaagctggtgccaatgatcatcaggttgggcagaaagacaaacaacacaagccaaccgacaatagtgacaatcactacattctggaacttacttgtgttcttcatcagccagtacgacctcccagctttctacccaattaatggccattttttggtcgagagagtggtcaaagtcaggatcgtcttcattgaagaattcgctgaccatcaccatcttgccattttccagttcaacaaccgactccagcgtcatgcctttgtagttacgctcgcgaacgtaaccaatcagcccttcagcgtggttgtcgtcgttaatctcttcaacacgtaagtcttccgggcgcagcagaacatgcagtttttgccccggttcaacggcgaagttaacgtagatattacattcgcggccttcaacgttggcgcgtacgcgctgctcgtctagacgttcgatgacagtggcgttaaacatattgatttcgccaatgaagccggcaacaaacaggtttttcggctcttcgtagatttcacgcggcgtgccgtcttgctcaatgcgaccatcgcgcatcaccacaatcctgtctgacatggtgagtgcttcttcctggtcgtgagtcacaaagacgaatgtaatgccaagcttacgctgtaacgctttcagctcgttctgcatttgcttacgcagtttgtaatccagcgctgagagcgactcatccagcaacaacagacgaggcttgttaaccaccgcgcgagcaatggcgacgcgttgctgttgaccaccagagagctgatgcggtttgcgttgagcgaaggtttccaactgcaccatccgcagggcttccatcacgcggggcgtaatttcagcagcgggggttttttgcatgcgcaacccaaaggccacattttcgaacacggtcatgtgggggaaaagtgcgtagctttggaaaacagtgttcacatagcggttttccgccggaacgtgggtgatgtcctcgttatccagcatgatgcgtccggaatcaacagtttccagacctgcaatcaggcgaagaacggttgttttaccgcagccagaagggccaagcagcgtgaggaactcgccattgttgatagtcagatccagctggggaatgacctctttaccatcaaagcatttgcgaattcccgccaattgcaccagcggtgaaagcgaactcggttgtttattcaattttttactctgtcccatgtaaacgcaacggatggcttaccgatgcggggtttgtggttaaccaccttggtgactcttaatgagggcggtaattctacggcaaaccgcttgaatcgccaatctttgttgtgaattactggcttagctttatattcattaaggtaatgctgataaatattcccgcttgcaggggtaaaagtgacctgacgcaatatttgtcttttcttgcttcttaataatgttgtcacaaaaagtgagggtgactacatggataaactacttgagcgatttttgaactacgtgtctctggatacccaatcaaaagcaggggtgagacaggttcccagcacggaaggccaatggaagttattgcatctgctgaaagagcagctcgaagagatggggcttatcaatgtgaccttaagtgagaagggcactttgatggcgacgttaccggctaacgtccctggcgatatcccggcgattggctttatttctcatgtggatacctcaccggattgcagcggcaaaaatgtgaatccgcaaattgttgaaaactatcgcggtggcgatattgcgctgggtatcggcgatgaagttttatcaccggttatgttcccggtgctgcatcagctactgggtcagacgctgattaccaccgatggtaaaaccttgttaggtgccgatgacaaagcaggtattgcagaaatcatgaccgcgctggcggtattgcaacagaaaaaaattccgcatggtgatattcgcgtcgcctttaccccggatgaagaagtgggcaaaggggcgaaacattttgatgttgacgccttcgatgcccgctgggcttacactgttgatggtggtggcgtaggcgaactggagtttgaaaacttcaacgccgcgtcggtcaatatcaaaattgtcggtaacaatgttcatccgggcacggcgaaaggagtgatggtaaatgcgctgtcgctggcggcacgtattcatgcggaagttccggcggatgaaagcccggaaatgacagaaggctatgaaggtttctatcatctggcgagcatgaaaggcaccgttgaacgggccgatatgcactacatcatccgtgatttcgaccgtaaacagtttgaagcgcgtaaacgtaaaatgatggagatcgccaaaaaagtgggcaaagggttacatcctgattgctacattgaactggtgattgaagacagttactacaatatgcgcgagaaagtggttgagcatccgcatattctcgatatcgcccagcaggcgatgcgcgattgcgatattgaaccggaactgaaaccgatccgcggtggtaccgacggcgcgcagttgtcgtttatgggattaccgtgcccgaacctgttcactggcggttacaactatcatggtaagcatgagtttgtgactctggaaggtatggaaaaagcggtgcaggtgatcgtccgtattgccgagttaacggcgcaacggaagtaagcgaaaagggatgcggcatgtgatgccgcatccggcttaaatccaaacttacccttcgaagaaccaatacccgctattgaccagcgccgcgagcatcgcgaggaatgacggatcttccagcgcatcgccaaaattctccgcagtcagcgcaatgttgctggcgagtgcatccagtgccggacggtgcggggaatcgatcttctcaccattggcatacacgtcgtcgccaatgcgcaatacgcgcagaccacccaggcgcaccagcacttcaccttgtttcagcgcatcgtagatttcatccggctgataaggcggctctggcggcgcgatatccagttcatgacgtgactgggatataaactcgccaaaccattgcttaaagtgttccggctggttgatcaattcgagcatcatctcacgcagtttatccatctcttgcggcagaacatccgcaggatgagcgcgaggtggaacatccggatcgctgtagtagttgccgcccagttcacgttgcagcacataatcggcaaatccactaatcagttcccgcgtatttggcgcgcgaaagcccacggaatagttcatcgcattttccagcgcgtagccttcatgcgggaatcctggcggaatataaagaatatcaccaggctccagctcttcatcgatgatggcttcgaacggatcgacctgtaacagatccggatgtgggcagtgctgtttcatttgcagcttttcgcccactcgccagcgacgacgtccggtaccctgaatgataaacacgtcgtactgatcgagatgcgggccgacgccgccgccgggtacagaaaaagaaatcatcagatcatcaatacgccagtccggtagttcacggaacggtcgcatcagcgcggcggtcggctcatgccagtggttcactgcctgtaccagtaatgaccagttggtttcaccgagatgatcgtagctttcgaacgggccgtggctgacctgccatttgccatcctggtgactgaccagtcgactgtcaacttcgctttccatcgccagacccgccaactcgtctggagagatcgggtcaataaaattattaaagccgcgttttaacaccaccgggcgtttctgccagtgacgttcaagaaaatcgggccagttaagagtgagttggtattccatgttaagcatccacaggctggtatctgcaaccgattataacggatgcttaacgtaatgcgtgaagtatgggcatatttattcatctttcggcgcagaatgctggcgaccaaaaatcacctccatccgcgcaccgcccagcatgctctctccggcgacgattttaccctcatattgctcggtgatttcgcgggctaccgccagccctacaccttgcccagggcgtaaagtatcaacccgttgaccacggtcgaaaatgacctctcgcttgcttaatggaataccggggccatcatcctcgaccacaatatagagatgctcgtcggtttgccttgcagaaatttcgacaaactcgaggcaatatttacaggcattatccagcacgttgcccatcacctcgacaaaatcgttctgctcaccgacaaagctgatctctggcgaaatatcgagagagatattgacccctttgcgttgatacactttgttcagcgctgaggtgagattgtccagcagtggggcgaccggatgcagctcgcggctgagcaatgtcccgccgcgcatactggcacgatgcaggtagtagccaatttgctgtgaaatgcggctgatttgctccagcattaccggctcagcatcactgacgctcatcttttcactacgcagagaacgcagcgtactttgcagcaccgccagtggcgttttcagactatgggtcaggtcggtgagcgtcgtacggtatttgtcgtaacgttcgcgttcactttttaacaatcggttcaggtttcgtaccagactggtcagttctcgcgttgtggctggattgagcaattcgcggttatgttcttccagttcgcggacttcttttgccagggcttcgatggggcgtaaactccaccaggcggcgacccacagcagcgggatcactaacagcagattggctgagagcacatagataaaccagctccagaccatataggaactttttagctccaccggaatggtatccaccaccacaatggttaattttggcatccgcgatgttgccgggtagacgtttactgccaccgagtgggtcatctccgcgtcgtcatcatcttcccgcacttcctgcaactgttgctgtatcgaatgatctccactcagcaagaggctggtatcgttaacatccgcttcaatttcatgaaaaccattcgatttcagccagtcaggctggatcatcttcatcagccagggcacgtcacgttgcgcccataaaagctgcccgttctcatcataaattagcgtcatggtggggctttgcttgtcgatattttcgggtaactcgacatgcaacttattgttttcccacttcgcaagggtatagaacagattgctctcgccacgtaacagccgaaacgtagttttatcgaaactgacgctataaccgatcagcgcgaccattccgtaggcaagcgaaagcaccagtactaccgctgccgttgccaacagaaaacgtacccgcagcgagagcgggaaaaaaagacgcagtaattttttcatcagcgcaattcgaacagatagccctggccgcgaacggtggtaatcacttcttggggatattgtgcctgaatttttttgcgcagacgtcccatcagtacatcaatggtatggctttcccgcagctccgcatccggatagagttggagcattaacgaatctttgctgaccactttgccattattgcgtatcaacgtttccataatggtgtattcgaacgcggtcagtttgatcacttcgtcattaatagataattcacggcgagagagatcaacctgaaacggggggagcgaaatgacctgtgaagccagaccgctattacgccgcattaatgcctgcattcgcgccatcacctcttcaatatgaaacggtttagtcacataatcatcagcaccggcacttaatacttcgactttgtcctgccagctttcacgggcggttaataccagaatcggcagtgaaacatcgttgctacgccagcggcgaatcagtgacagaccgtcctcgtctggcaatccgagatcgacaatcgcaatatccggtatatgttcattgagataataatcggcttctttggcatcttctgcgtcatcgacctgatgaccagcatcctgaatctgaactttaaggtggtgacgtaacaacgcattgtcttcaacaaccagtacgcgcatttttatttctccctgtcttaattattaaaatagtgtaacgcgattatgtggttatgggggtaaacattaaataaaccagcggggaggggaggtaaagtgaaaaaataaaaagcggataatcttaataagcaggccggacagcatcgccatccggcactgatacgaggtttatttcagctcatcaaccatcgtgatagctcgaccaatatagttagccggcgtcatcgctttcaggcgggctttctcttcttctggcaacgccagaccatcgataaactgcttcatgccttcggcgtcaacgcgcttaccgcgagtcagctctttcagcttctcgtacggtttttcgatgccatagcgacgcataactgtctggattggttcagccagcacttcccagttgtgatccagttcatccagcagatggtcacggttcacttccagtttgctcacgcctttcagggtggattgatatgcaatcaaggcataaccgatacccacgccgaggttacgcagcacggtagagtcggtcaggtcacgctgccagcgggaaaccggcagtttgcttgccagatgctgcaataccgcgttggaaaggcccagattcccttcggagttttcgaagtcgatcgggttaactttatgcggcatggtggaagaaccaatctcaccagcaatggttttctgtttgaagtggttaagggcgatataaccccagacgtcacggtcaaagtcgatcagaatagtgttgaagcgcgcaacgcaatcaaacagttcggcaatgtagtcgtgcggttcgatctgggtggtgtacgggttccactgaatacccagcgaggtgacgaactcttcgctgaactgatgccagtcaacttccgggtaagcggcgatgtgggcgttatagttaccgaccgcgccgttgattttgccgaggatctccacctggttaagctggcggtactggcgctccatacggtaggcgacgtttgccatctctttaccgatggttgacggcgtggctggctgaccgtgggtacgagacagcagcgggatatcgcgatactgaacggcgagatctttaatgccatcaatcagttgacgccagtatggcaggatcacttcatcacgcgcggttttcagcattaatgcgtgggagaggttattgatatcttccgaagtacaggcaaagtggatgaattcagaaaccgcgtgcagttccgggatctccgccactttttctttcaggaaatactcaaccgctttaacgtcgtggttagtggtacgctcgatagttttgatgcgcgccgcatcttcttcgctgaaactggcgacgattgcatcaaggtaaccgattgcgtcggcagcaaaagcaggaacttccttgatcgctgcgtgcgcggccagtttttgcagccaacgtacttcaacttgtacacggaatttcagcaaaccatattcgctgaaaatcccgcgcagcgcgctgactttatcgccgtagcgtccatcgacaggggaaacggcggtcagtgaggataattccatagatcacaactccggggttaaatgagcaagaatttgttttgcctgagtggtcaggcgattacgagaaaacatcagttgcagacgtccgccgccgacctggtgccagagcacggcggcgcgaatgcctgccagcagggttgcgcgaactttcgcctgcacttgtgggctttgcagtacagcaggggaaccggtgacctgaatgcgcgggccaagcgggctaatcacatcaacatagatagcagccatcgcgctcatcagcgtttcggactgtaaatcgaagtgttcgagctggcgttgcaggccgttgatccggttgcccagagtgtcgagcgcgcctttcgctgaggagagtttgcgctcaagcaccatcaagctgagtgtgtagcgggttaattcggcgtttaagccctggcgactgctggcattgagcacgccgagcagggtttccagcccgacgcgcaggttggcttcgctaccgccaaaaaccgccagcgtcgagctggggttcatatcaataatactgttgagtgagacgtgtagcgcatcggcatcacaatgcccctggtgagcgagttgttgcaccaggcgtgccgactgacaaataccggccagggcgagggtgatgtcatagtaattctttgccacgttcactgcttccttgttttaagtaaagataataatcagaccggcagcggcagacgctgctcaataataccgccaccgaggcacacttcaccgttatagaagacggcagactggcccggcgtcacggcggcaaccggttcatcgaaaatcacttcaatgcgatcatcgtccagcgccttgacggtgcaagggatatcggtctggcgatagcgggtttttaccgtgcaacgcatagtgccggtgaatggttcgcgatcgacccagtgcaactgctgggcaatcaacccgacagacatcagccgcgggtgttcatggccctgagcgacaaccagaatgttgttttcgacgtctttgtccaccacataccacggttcttcggtaccttctttggtgccaccgatacccagacctttacgctgaccgagagtgtgatacatcagcccctggtgctcaccaatttcatcgccatcgacggtaatgattttgcccggttgcgccgggagataacggcccaggaactcgcggaatttacgttcgccaatgaagcaaatgccggtagagtcttttttcttcgcggtgaccagaccaagatcttcagcaatcttacgcacctgcggtttttccagttcgccgaccgggaacaggctttgcgcaatctgctcatggctgagcgtataaaggaagtagctctggtctttattgctgtccagaccacgcagcaggcggctcttgccatcgacatcggcccgacgtacgtaatgaccggtagcgatataatcggcacctaaatcttcggcggcaaattcgaggaaggctttaaatttgatctctttgttgcacagaatatccggattcggcgtgcgaccggctttatattcggcaaggaacagttcgaagacgttgtcccagtactcggcagcaaagttaacggtgtgcagttcaatgccgagcttgtcgcagacagcctgggcatcagccagatccgctgccgctgtgcaatattcctcaccgtcgtcttcttcccagttcttcataaacaggccttcgacctgatatccctgttgttgcaacagccaggcagaaacggaggaatcgacaccgccggacatgccgacgattactttttttgcggtttcagacattggatcactcacgacattgaacttcaaggcggcgtattctatcacgcagccttttagatgacaccctttgtaaaaggccagttaaaatcgccaatcatctccagcggataacgttgcccgctttgataacaacgaatactttccgccaccagcggcgaacgaagatttgacgcctgtaaaatttcttcggcgctgacccaacggcagcagtcgatatcgctgtcatgaggctgggtcgggcatatttgctcaagctcaatggcaaagaggaaacgcaaaaacggcgttttatctggcgcaatccactgatgcatacgaataaagtgttgcggctgcgcgctgatgccggtttcttcccacagttcacgggcggcggcttccactaaggtttcatcggcttccagatgcccggcaggttggttccataacgctttaccattaatcgtctcttcaacgactaaaaatttgccttctgcgtgcaccacgcaagcaacggtaacgtgcggtttaaacattttgcatccttaatctgtcacttctcgccattcaccattggcaagattatccaaagagtaatcacccatcgcatagcgaatcagtcgcagcgtggggaagccaacatgggcggtcatgcggcgcacctggcgattacgtccttcatataaggtgatcttcagccagctggtgggaatacttttgcgttcacgaattggtggattccgcggccataaccacgcgggttcgtcaaccagctccgcgccggcgggcagggtagggccatcatttaaggttacgccattgcgcaaggcttcaagtgcgtcttgtgtgggaataccttccacctgcacataatagatttttccggtgcgtttacccggctgggttaaacgcgcctgcaacgcgccgttattggtcagcaccagcaacccttcgctatcgcggtcaaggcgacctgctgcataaacaccctgaaccgggatgaattcttttaatgttttgcgtccggcttcatcggtgaactgcggaagaacatcgtagggtttattgaacaggatcacacgcgtgggctggttttcaggtttacgcctggtagaacgttgcgagctgaatcgcttaacctggtgatttctaaaagaagttttttgcatggtattttcagagattatgaattgccgcattatagcctaataacgcgcatctttcatgacggcaaacaatagggtagtattgacaagccaattacaaatcattaacaaaaaattgctctaaagcatccgtatcgcaggacgcaaacgcatatgcaacgtggtggcagacgagcaaaccagtagcgctcgaaggagaggtgaatggaaagtaaagtagttgttccggcacaaggcaagaagatcaccctgcaaaacggcaaactcaacgttcctgaaaatccgattatcccttacattgaaggtgatggaatcggtgtagatgtaaccccagccatgctgaaagtggtcgacgctgcagtcgagaaagcctataaaggcgagcgtaaaatctcctggatggaaatttacaccggtgaaaaatccacacaggtttatggtcaggacgtctggctgcctgctgaaactcttgatctgattcgtgaatatcgcgttgccattaaaggtccgctgaccactccggttggtggcggtattcgctctctgaacgttgccctgcgccaggaactggatctctacatctgcctgcgtccggtacgttactatcagggcactccaagcccggttaaacaccctgaactgaccgatatggttatcttccgtgaaaactcggaagacatttatgcgggtatcgaatggaaagcagactctgccgacgccgagaaagtgattaaattcctgcgtgaagagatgggggtgaagaaaattcgcttcccggaacattgtggtatcggtattaagccgtgttcggaagaaggcaccaaacgtctggttcgtgcagcgatcgaatacgcaattgctaacgatcgtgactctgtgactctggtgcacaaaggcaacatcatgaagttcaccgaaggagcgtttaaagactggggctaccagctggcgcgtgaagagtttggcggtgaactgatcgacggtggcccgtggctgaaagttaaaaacccgaacactggcaaagagatcgtcattaaagacgtgattgctgatgcattcctgcaacagatcctgctgcgtccggctgaatatgatgttatcgcctgtatgaacctgaacggtgactacatttctgacgccctggcagcgcaggttggcggtatcggtatcgcccctggtgcaaacatcggtgacgaatgcgccctgtttgaagccacccacggtactgcgccgaaatatgccggtcaggacaaagtaaatcctggctctattattctctccgctgagatgatgctgcgccatatgggttggactgaagcggctgacctgattgttaaaggtatggaaggcgcaatcaatgccaagaccgtaacttatgacttcgaacgtctgatggaaggcgctaagctgctgaaatgttcagagtttggtgaagcgatcatcgaaaacatgtaatctctccatgtgttaaatattgaaacgggcgtataacacgcccgttgttttatttatgtggatattattaatagcatatcgagcatatttatatgaagcccattacttgagcccatatgggcatatttttataatgcaactattatgtaaacatttatttgttattttgctttctcctggaggacactcttgactgcttttgagtaaactccataaatccttgttgaatggtgcgatgtgataaatagtaataggatattctttatccttaaggataataccagacttaaccggtgtaaatatactgccaggagggagaaatatagtagattgataccagatgatcattttcatattaccccatatggctgaaaaagatataccacatgtaggttgaattaccgtgtcaattactatccacttcatttgttatgtcttatcccacggtatttaatatggttcattaggatgtttatttcttgattttgcatatgagtatattacccccccctcaaaaaaataaattaattaaaatgatggcttatataaaataaaatttaaagcaaggaatctcaatggatgttaaacaaaatgagattttgtgaaagcaataaattattgacttcgttttagatttgtttagctataatgttatacattcaaatgactgaacatcctgtaattaaaacatagcctttatgctactttgtgccaatttgctaaacattatggttgcctttttatataacgataataatgaatataagcatgacatgagaataaggtttcaatttttgagttatataggaatgatttaacctgttcctggctaaaatacatataaccggatgatgactaaaccaaaatacatgtgcgttaagtattgaaacggacgtgtggcacggccgttgtttttataaatatgttaaccgttataaaataacgtatcaaaagtcaagtgatcacatttcaaatatcaagttgatagtattagtctggtgattatttatgggtgacaataaaaagacagtattaatcatccatagagatagtctctgcacttttatttccattatgctaatgccttactgaattatgaagcatttcttaagtatccaactttagctagattaatggtttattattttctacatcttcaatatataaaagcgtattatcaatggcgtagtaactgcgtttgttatgattaacatcagtaacccaccggaaaacgcccgcgcctgccagtgttgaacagtattcccgaaatgtagattttccgcaaatatgaagcaatgcggcctcttttattttagcagggttcttggtcgtactaacttttaacaggttcctggttcctcttaataacaaaaccgtatcatcgtgagtaataattctgatgttatccgtagccagataataaatgtaatgtgcaatacggtgatgttttaattctgaataaaaccaggagaagttttgctcttttctcacttgctcaaacatcttttgaaaaacaacgacctgatccatcaggataataacctcttgttagttgtgagactgcgtagtgtgcacgatcggttttaccacttcaatctggtctgtcctttggctgtgatatgtacagagtgtgatagagggaatatctgaattctcccggtgagcattttgcaacggaccagctccggtacaaacgctgttgtgggttcagattataacattctgtctaaggggcgggataaaggtgaaattagggggcatgaaagatgactttataaccttgctcaccccagtgttgtaaaagttcgttttgccttctcgttggtgccatgcctgtccagacaatcaatgtttgcgtcgggaacagttccgggcgcggcgattcaatgggatcagcaagaacagaaatgtgccatcctgacaatgataaacgccatgcttccagccacaatcgtgctctctcttcaacattccacgccatcagaatggcttctttaccgggcttacggcgcatttcgaaaagcgaggttgctgcgtattcaattaatgcgccgtcaaacatactgctcataatgcgggaggtgttgtgatcaagcacgagacgctggcgaacaggaaggtaaacatgattaatcaattgatctactgggtactctcgacccagtgaaataattctcgcgcgtagtttggcaggattagccatgcgaagaattgacatcatctcttcttgcaggcggctccagtcatcttccgtatcctggctggtggtttccagtaatgctttaactttgcctacagggacgccattacttatccaacgcttgatctcttcgatgcgttgtatgtcttcttcatcaaagagtcggtgtccgccttcactgcgctgtggttttaacaaaccgtagcggcgttgccaggcccggagagtgacaggattaatcccgcaacgttcagcaacatcaccaatgctgtaataagccacaattcctccttgcggtcacaaatctccgtcgcctgtacacgacccaataatactttgtacaatatacgctaaaattgtacaaagtataaataagatttcagctaaattggatgaaacattatttttaatgtggattaaatttaaacgtaacgtattcattttcacgatgatttactgaaatcatgtgaaagaatgtgctgaaaattattttttctctggccacgctatggaagggataccattcaatttagctttagcaaacagatctccctgaaacatctcaattcctgcggattcaagccacatccactcttctggtgttgccacgcccatagcactgacttgaatttcaagtgatgtacagcattttatgatcgcctgaataattgcctgccgtggcccacttttatgaacattggtaatcaattcctgactgattttaattctgtcaggctggaagcgtgacaggagtaacaaaccagcaaaacctgcgccaaaatgatcaattgctacactgataccagcagcctttagcgatttaatcgcttcggcaaactcatcaaaccgagatatgacttcactttcagtaaattcaacgatgatttgttcaggcaccagagcattggcctttatttcattaagtaaaaaagagactgcgtcaggttcgttaaccagggtcataggtaatagattgattgaaatcattttatcaccgagctcaagtgcgtgtgccatcgtgaatgcaagcgccttacttttgagatccgctgtgtagatttccccgtctttacgctgcccaaccgctatggctgatgggctatcttcatttttttgcacaatggcttcaaaagcgattatccgccgcgataagggatcgacaataggatgaaaggcaaagtggtcgtttatagttggtgaaagggcacaggaatcaagttctttatcagatccgtcagcgataaaaagccaggagtcttcggcagggatctcgaaataggttgattgttcggttgcaaggacaaaagtacgaaaaaattgtagcgctctgtcatcataagttagctgaaattttgatgtgcctttgtcgaatacggcctgtaaaacgtcatctcgctcgtgcaggcgcaaatcaaataattccattcccgctttgccaaaacggcgagcaggcgcgtaatcgcacagcagctcaacaatattatagtgccgtggatcctggcatatagcccgatatatcattttaacctgttcttccggaccttccagaagctggaaaaaatgagaaccattaaacagtaagatccctgttacgtcagactgcatgttcctgcgatttgctatcgaaaccatttcttcgatttttttgacaggttcgtcgtcacgtatatggctacgataaataagggtggtaagcattaacaatccagggtaatgggtgaggcgagagtaagacggtaacagacatatcttcttgtgtctttcttttaataccaaaacataaccgtttctttacattgataaaaaatggaaaaagttgaacactagttggcgaaaaatcttgtatagattgtcagttaaatgatgcaatatgttttatcataacacattgttttatatgcattagcactaattgcaaaaaattaatttatcattctgtacacatatttcgtacaagtttgctattgttacttcacttaacattgattaacatttttaacagaggcgtagcatgcatcaaaattcagtgactttagattctgcgggagcaatcactcgttactttgcaaaagctaacttgcatactcagcaggaaactctcggggaaattgtgactgagattttgaaagatggacgtaatctgagtcgaaagtcgctttgtgccaaacttctttgccgactggaacacgcgactggggaagaggaacagaaacattataatgcactaattgggttgctttttgaataatgcaacagcctgattatttaacaggttagctatgaagtcgttatgaagacatctgataatgaacgtataaaatatgaaattactggccaggcggtgctccagatactgcgcatgaagataaatttttcattgcagactcttattaagcaattactcgtaatgaaatcggctgaggaagatgctttccgacgcgatttaattgacagcataattcgtgattttagcaatagtgattcaggagggccaaaccgaagaacagcgacagctgacaataaaagtatgttcaatggtaagaaaataaacagaatacattaaaatttcataagtaagatgagaggttaccatgcttgaagatactacaattcataatgcaataactgataaagcgttagcaagttactttcgcagttcgggtaatttgttagaagaagaatcagcagtgttagggcaggctgtcaccaatttaatgctttcaggcgataatgttaataataaaaatattatcttaagtctgatacactccttggaaacaacaagtgatattctcaaagctgatgtgattagaaaaacactggaaatcgtgttgcgatacacagctgatgatatgtaacttctaattattaagtataagtttatagaaaactcattcatcttatttttgtctgtcgctttagactatacacagcataattttattgggttaatatttctacgaggctgacatgaataattcaatcccagagagatttatttttcaatgtgctttgtttaaaaatctcgagagggaggtgttcatgacgcatgggtatgttgatagtcatattattgatcaggctttacgcttgcgtttaaaagatgaaaccagtgtgattctttctgatctctatctgcaaatattgcagtacattgaaatgcataagactacactaacggatatcattattaatgacagggaatccgtgctctcttagaacttgagtaaggttttagaataaacatcagctgtatcaccatgctgatgcaaagtgagcatttcaggcgttatgctttcttattatgtccgcaatatcaggtgtcaagaatggagagttctcgctctccattcttgacgcctgatatcccgcctaacttattttgtactgcctacattatgctcaataattaatgggttagatcaagatggagaaaattttatcttcggcgtggatatttcttatgctctctaccatgctctctgtagatgccagcgcgagcgaatgaatggcattttcatgtattaaaccctttggccgggacaagcaaatgcgcaatacactcatacccatcctcgttgcgatatgcttgtttattaccggtgtcgctattttgaacatccagctctggtattccgcaaaagcagagtacctggcgggagcgagatatgccgccaacaatatcaatcatatacttgaagaagcgtcacaagcgactcaaacagcggttaacattgccgggaaggaatgcaacctcgaggagcaatatcagcttggcactgaagcagctctgaaacctcacctgcgcacaatcatcattctcaaacagggaatagtctggtgtacatccctgcctgggaatcgggtcctgttgtctcgtattcctgttttcccggacagtaatttactgttggctccagcaatcgacaccgttaatagattacctatcctgctctatcagaaccaatttgcagatacgcgcattttggttacgataagcgatcagcatattcgtggggcacttaatgtacccttgaaaggggtaaggtatgtattacgcgtggcggatgacattattggaccaacgggtgatgtgatgacgcttaatggacattatccctataccgagaaggttcactccacaaaatatcatttcactattatctttaacccgccgccactctttagcttctacagacttatcgataaaggctttgggattttaatatttattctgttaatcgcctgcgccgctgccttcctgcttgatagatatttcaataaaagcgcaacgcctgaagagatcctgcgacgggcaataaataatggggagatcgtccctttttaccaacctgtggtaaatggtcgggaagggacattgcggggagttgaggtgttagcccgctggaaacaacctcacggtggatatatatcacccgcggcatttattccacttgctgaaaaatccggattaatcgttccgcttacgcaaagcctgatgaatcaggttgccagacagatgaacgctatcgcgagtaaattgccggaaggttttcatattggaattaattttagcgcttcgcatattatttcgccgacgtttgtcgacgagtgtttaaatttccgtgacagttttacccgccgcgatttaaaccttgttctggaagtcaccgagcgtgagccattgaatgttgatgaaagtctggttcagcggttgaacatactgcatgaaaatggttttgtcatcgcactggatgatttcggtactggctactcagggctttcttatcttcatgacctgcatattgattatatcaaaattgatcacagtttcgttggccgcgtaaacgcagacccagaatcaacccgaattctggattgtgtattggatctggcgcgtaaactttcgatcagtatcgtcgctgaaggtgtcgaaacgaaagaacaacttgactatctgaaccaaaattatatcacatttcagcagggttattatttctataaacctgttacatacatcgacctggtcaaaattatcctttctaaaccgaaggtgaaggttgtggttgagtgaaaattgatcagtaaggccatagtgcggtgtaattatagacagctaattagctcgttgcctcttgttactattgttcattattttgtttgctataattgtttgaaagttttgacaggattgccattagtagcatgaacaatagtaataatctggattatttcactctctatatcatattttccattgcatttatgctgatcaccctcctggtcatccttattgcaaaacccagtaccgggctgggagaagtgcttgtgacgataaatttgcttaatgcccttgtttggctggcgatcaatctggttaatcgattaagagaaagactcgtcaaccacagggatcagcaataatctttcagtttctcactgtcagtatgcggctgaatgggttgctggcagtgaacgcctggatcattgaaggaaaggcattattgcgcaaatagttgtcaaccctggtgttatcacggttgtttttatatatcaccgaaataatcctcatcgcaactattaacaattttgatgtcgaagagttatttgttaaacaaaatcgtcacctcaaagtgatcaatgtcatgaaaataaggtgaaaaatgataatgccgacttatttatcatttatatattgtcgctgtttatctatttaaattttttgtgcttttgtttttgtctttaccctccgttttggtaatctgagctcataggttatttgaccaggaatgtttgttaatccaatgaatggatggttaatctatgaaactgaaaaaactccccgggtttagtttgggacttattgctctggcggtgggtaatgcatatgcaacacaattgttggatgattatagtataatttcctatatgactgatgaagaatcgccgattgaaatcaaagataataatccgataagtaatggagagtatctaaccactgaagacgaaagccatgctgtgaaagtggatgacggtgtaactggatatataaataatgccagtgtgatgactagtggtgatggatcttatggtatttctgttgatagtcaaaacaaagtattatatataagcgatagcgatattaagacctctggaagcgtatctgacaaagaaaatggagggataacagccagcgcagtagtcagtgaatttggtggcaccatctttatgaatggtgataattcagtcgagtcgggtggggcatattcagcgggacttttaagccaggttaatgattctgaaaagatggtaaataacacccgtcttgaaaccacagataaaacgaacattgttacctctggggaaaatgcagtaggtgttcttgcatgttcaagtcctggagagtctcgaacatgtgtcgatgctgtagatgatgaagttagtgattctaacagttacgaagttattagccgtgctgatttaaaaatgaatggtggttccataacaactaatggcattaatagctatggtgcttatgctaatgggaaaaaagcatatattaatttagattatgtggcacttgaaactgtggctgatggaagttatgcagttgctattcgacaaggtaacattgatataaaaaatagttctattacaacaacaggcactaaagcccccattgcaaaaatatacaatggtggagagttatttttttccaatgtcaccgcggtatcaaaacaagataaaggaatatcaattgatgcatcaaatatcgattctcaagccaaaatagcactattaagtgttgaactttcaagtgctttggatagtattgatgttaacaaaactacaacggatgtaagtatccttaatcgaagtattatcacacctggtaataatgttctggttaataatactggaggtgacttaaacataatttcgtccgactctattctaaatggagcgactaaactcgtcagcggcacaaccacgctgaagctttcagaaaatacaatctggaatatgaaagatgactccgttgttacccatctgactaattcagacagtattatcaatctttcgtatgatgatggtcaaacatttacccaaggaaaaacattaaccgtaaaaggtaattatgtcggtaataatggtcagcttaatatccgcaccgtattaggtgatgataaatcggctacggacagacttattgttgagggtaatacttcgggttcaactaccgtctatgtgaaaaatgctggaggaagcggcgcggccacgctaaacgggatcgaactcataactgtgaatggcgatgaatctccagcagatgccttcagataaggtgatgcaaggattgcagctggagctttcgaatatcaactaaaacaacaaggcaaaaactggtatttgacaagttatcagtcagtgaatgaggaggataacagctcagagggaaattcagaatcaacagaaacgcctacccccgtcctgcgccccgaagctggaagttacgtcgctaacctggcagctgctaacactctttttgttatgcgtctgaacgaccgtgcgggtgaaacgcgctacatcgatcctgtaactgaacaggagcgttcaagccgactttggctacgtcaaattggcgggcataatgcctggcgtgacagcaacggacagttgagaacgacctcgcatcgctacgtctcgcagttagggggcgatctgttaaccggtggttttaccgatagtgacagttggcgtttgggagtgatggctggttatgcccgcgactacaacttaactcattccagcgtgtcggattatcgttcgaaagggagtgtcagaggctatagcgcagggctgtatgccacctggtttgccgatgacatcagtaaaaaaggcgcatacattgactcctgggcgcaatatagctggtttaaaaactcggtgaaaggggatgaattagcctatgaatcctatagcgcgaaaggtgcaaccgtctcgctggaagcgggttacggttttgccctgaataaatcctttggtctggaagcggcgaaatatacgtggatcttccagccacaggcacaggctatctggatgggcgtcgatcataatgcgcacacggaagccaatggctcacgtattgagaatgacgcaaataacaacatccagacccgactcggcttccgcacctttattcgtactcaggagaaaaacagcggtccgcacggtgacgactttgaaccttttgttgaaatgaactggatccataacagtaaagattttgctgtctcaatgaacggtgtgaaagtcgaacaagatggggcgagtaatttgggggaaattaaacttggcgtaaatggcaacctgaatccagcggccagcgtctggggaatgtgggcgtgcagctgggtgataatggctacaatgacaccgcagtgatggtgggcctgaaatataagttctgatcccgccgttagctaaaaaaccgcgtcgtattcatcgacgcggtacatatgaaatattattttttgccgatagcacgcatggtgtcatcaattgccgtgatcaacagcatttgcgggtctttagcgcaaacctgattcagtttttctaccactttggcgctcagttccggagattgctcaatttttaaatcacggctggcaacgctggcattacccattaccgcaacaatttctgcaacctgtgcgctgtcagtttttgccatttcgttggcttctgcgcaagtaatataggtttctgacggcaaaccgtttttaatattgtagtcctgcgcccaggtcattggtgcgaaaacaaacaggcccgccagtaaagcaaattttttcatcatcattccttatttcattttacccagaattgcaccacccgtaccgccaatcacggcacctttaatcgccccttcgaggccattgccggtcagaacgccagtgacagcaccaacggcggcacccacttttgcacctttacgcgcatttttaccgtcgcggcctttttctgttactgcaccaacaccagcgccaacagctgcacctttcagtacgccattaacaccattgccagtaagtaaaccaacgcctgcgcctagcaatgcacctttcgtggtgcggttcatatccgccatcgctggcgtggagcagaacaatgctgagataagcccgaaggcaagtatttttttcttcaacttagatgtccggtattaagtaagttgcacacacaataatttcgtcttcaattaagatctgcttaactaaagaacgctcgctattattcagataattcaaaatgagcgtggctgtgatgataggaattatgttttttacgtgaatgagaataatcttaaatgaggaataactcattgattgacaatatttttattcaagaagtgtcattgactgttaacgcaatgttgtaaaggtaagataatctgatttatcaatattattgtgtgatttttatgtgagcagaagatattcatcagcaacgattacattagtcattttattttgccgacggcctcattgtcgaaagataagcgtacgacagtattatcagaaaagagtgattttttatccaactacacttcagcgcactgcgtgtaaaaaatgcctctttcttatgcgggatatcatcatttcatcatgatgtctttggtgagcggtgaacacaatacacctgcgctgtctcttcaggatgaatcccctggtctggtgcctgcgggctgatgttgcagcagagcttaggtcacttagacgctactatcatttatccaatggcatggaatcgaaatcagtcgatacccgcagtatatatcgtgaactgggtgcaacgctgagttacaacatgcgcctggggaacggtatggaaatgaaccctggctgaaggcggctgtgcgcaaagaatttgtcgatgataaccgggtgaaggtgaataatgacggtaatttcgtcaatgatttgtcgggcagacgtggaatataccaggcagctattaaagcctcattcagcagtacgtttagcggacatctcggggtggggtatagccatggtgccggtgtggaatccccgtggaacgcggtggctggtgtgaactggtcgttctgaccatcaacgattaaactgcgcttcggcgcagttttcgtttacaggatgttgaaagggaaaattctggggcaaaaaaagcccgccagttacggcgggaaacctcatcctatgggagaacaatgaataatgaaattgcggggttatcatctcccagtatatccatactaacaataaggttatttactcaaccaggcataaacattttgttttgtgcgtgggaacagccttaaggtgtaaagggggaggtggaaatagcaatgaggagtatcagcaagaatactcgccgctttaccacaacgtggatgagagggatgaaaaactcaaggcagagataactctgccttgaagataaatgcgcttttacagcgggcttatttcagctcttctgcttccggtaaggtcacgttcagctcaagaatagaaatatcgccatctttttgctcaagctgtacggttaccatctcaggatcaatttgtacgtatttacaaatgacctcaagaatatctttacgcaactgcggcagataatgcggttctgcatcgctgcgacggcgttcagcaacaataatctgcagccgttcttttgcaatgttggctgtgtttttcttccgcgagagaaagaaatcgagtaatgccataacttatcctccgaacaagcgtttgaggaagcctttcttctcttcttcaatgaagcggaaaggacgttcttctcccaacagacgttctacggtatctgcgtaggctttacccgcatcggcgttaatgtcgagaatgaccggttcaccctggttagaggcgcgcaatactgattgatcctctgggatcacgccgacgagtttgatgcgcaggatctccagcacatcttccatgctcagcatgtcacctctgcttacgcggcctgggttatagcgcgttaacagcaggtgctctttaataggctcttcgccattttctgcgcggcgtgatttcgacgccagaatgcctaaaatacggtcagagtcgcgtactgaggagacttccgggttggtggtaataatggcttcgtctgcaaaatagagtgccattaacgcaccggtttcaatccctgccggggagtcacaaacgataaattcaaaatccatcgctttcagatcatcaagaactttggcgaccccttcacgggtgagggcatctttatcgcgtgtttgcgatgccggcagaatatagagattttcagtacgcttatctttaattaacgcctgatttagcgttgcatcgccctgaatgacgttgacgaaatcgtaaacgacccggcgttcacaacccataatcaggtcgagattacgcaggccgatatcaaaatctatcacgacagttttctttcccttctgggccaaaccagtggcgatggccgcgctggaggttgtcttaccaacaccccctttgcccgaagtaacaacaataatgcgtgccatagaaattccttgttaaaaagggatcaatttaacggttgaacggtcaaagcgttttcgactaactgcagtcgcgccgctttgccataaaattctgctgggatttgatcactcagccagtattcacctgcgatggacaccagttccgccatcaggttcgtacaaaatatttgcgtttcccggtcaccacttgcccctgccagcgcacgaccgcgcatcatgccatagacatgaatgttcccatcggcaatcaattcggccccagcgctaacgtggcttgtaacaatcagatcacattgtggagcataaatacgctgaccggaacgcaccggggtatctattaaacgcgtttttgtgaccggcgttgtattttgcgctggagcctgcggtgtgggagctggacgtggcgctttttcctttccttccgtcaggataggcagccccatcttttcaatttcggctttaagttgcgcatctttgcagccacttacgccaataacccgcaaaccggttgccgaaaccgccttatgcatcgctgaccagtttaccgggtcttccagtgcactgacgttgagtacaacgggggcatgttttaaaaatgcgggggcctgagcgattttgtcttccagcgcctgatggataaccttaggttctgcctcatgcagatgaaccacagataaagtgaagctactgcctttaagctcgattggcgtgtttgacatcctggccttactcaattagctattaatcatcgccagcgcgcgatgatgttccgaagactataaggcatgttatagtctggattatattgaggcaagtcaccctcccatttattcagagtaaaagtctattctgtgataaatggcgctgattcatagcttaaaaaatacccttgtcaatcaacccattgccgtcgtacttttgattgttcttatttacgcttcctttttccgcaccctaatcgtgacagcatctccagacctgtttaaatatccagtattgaggcaagtgtattttttcaccacgccaggctttcttaactttccattttttgcggcatcattaaagaacagatacccgttatcttaatatccgccacagaattgctctatcatagaaaccgcagaagacgtctgatacttctgtcaggtcatcgtaactcgtccaggtcagcggttttgattacggattgatgatgaaatgagcataagtgttgtacggttggattatcaggatgtgctatgaatatgatgcgtattttttatatcggattgtcaggtgtggggatgatgttctcatcaatggcgtctggaaatgacgctggcggacttcaatctccggcgtgcggcgttgtttgcgacccgtatatttgtgtgaactcagatggcatttccccagagttaacaaggaaatatctcggcgaaaaagccgctgaaaacttacaatcattacaaggctacgatcccagcgaatttacattcgctaacggtgtattttgcgatgttaaagaaaaattatgtcgtgatgatcgttattttggtgtggatggtaagcggagtggaaaaatcaatcaaaccaccacaaagatgttatttatgtgtcgtgagtgatgtcttgtttacattatgttctattcgtcattaacctcttgagcgacagagaggagtggggcattaacgtttatgacggggagagtccccgtcggttgacatttacttaatttgaatatcgacgttatattttttagttttgtttttacgggcgtcgtttcgggtttgcaacactcgcagctcatatttgccagaagcagggagtgagtattgtccgtgactatcgagttctggggaatatctggataaatcaactgaatcatcgattcctggcccgaagaggtaagtatcagcgccttcattagagatactcacatgcactttctgaccttttttggcatagaaggtatatgtatcgtaatcgtatccctttatttcgccggagtactgagcgctgctatggccttttctgaactcaacattgacattcttacccgcagcaaagctcgtggaggttagcagtgcaagcagcaatacagccttcctgatgctcttgattttcattggtagtctcctgttcagaatgagtacgatgaactgttataatataacaatccctaacgggagaattccagtggctttcctgcgttcggtaaaatcacgttgcggcatttttgccggggggattacttataaagggggcatggactcaacaaaccgtagaaatctacagctggctggcttgtggcgcgggtttcattgatgttagcttatgccaaaacctggcatcttaaagagtaaaagtatgttttgtgtgatttatcgaagcagcaagcgtgaccagacctatttatatgtcgaaaaaaaagacgatttttcgcgtgttcctgaggaactgatgaaaggttttggtcagcctcagttagcgatgattctgccgctggatgggcggaagaaactggtcaatgccgatattgaaaaggttaaacaggcattaaccgagcaaggttactatttgcagttaccgccaccacccgaagatttgctgaagcaacatctttccgtcatggggcagaaaacagacgacactaacaaataaccgatatccggcggtggcattatctttgtcggcgcgggttttcatatccacgataaggtgaggggaacgttatgtatcaacatcacaactggcaaggtgcgctgctggattatccggtgagtaaagtagtctgtgttggcagtaactatgccaaacatattaaagagatgggcagcgcagtgcccgaagagccagtgctgtttattaaaccagaaacggcactgtgcgatctgcggcagccattggcgatcccatccgatttcggttcagttcatcatgaagtcgaactggcggtgttgattggcgcgacactgcgtcaggctacggaagagcatgtccgcaaagccattgccggttatggcgtggcgctcgatctgacattgcgtgatgttcagggaaaaatgaagaaagccgggcagccgtgggaaaaggctaaagcgtttgataactcttgtccgctttccgggtttattcccgcggcggaatttaccggcgacccgcaaaatacaacgctgagcctgagcgtaaacggcgaacaacgccagcaaggtacgactgcggacatgatccataaaatcgttccgctgatcgcttatatgagcaagttttttaccctcaaggccggtgacgttgtgttgacaggcacgcctgatggcgtcggcccgttgcaaagcggtgatgagctgacagtcactttcgatgggcattctttgacaactcgcgttttgtaatactttttgccgcctgaaagcggcggcaaaacttgcatcgctgtgccagactggttataaggtgcgttttaacgtaatggcggaacacctgatgagcgatgtacctttctggcaaagtaaaaccctggacgaaatgagcgatgcggaatgggagtcgttgtgtgatggttgcggtcagtgttgcctgcataaactgatggatgaagacaccgacgaaatctacttcactaacgtcgcctgtcgccagctcaatattaaaacctgtcaatgtcggaactacgaacgtcgtttcgagtttgaacccgactgcattaaattaacccgtgaaaatctgccaacattcgaatggctgccaatgacctgcgcttatcgtttgctggcggaaggtaaagatttacctgcgtggcatccgctacttactggttcgaaagcggcaatgcatggtgaacgtatctctgtgcgtcatatcgcagtgaaagaatcagaagtgattgactggcaggatcatatcttaaataaacctgactgggcgcagtgataaatttaatagatgctgatgggggctttcttaatatacgtctggatgctcgccatttcgtagccctgtttttgaaagcgctctgtcataatgagagttacccgataccttattatcaacaggtaactctcaatctttaaaaaacgtctgtgtttttaaatgtgataaaccttataccttgagtacatggagagaataatcgcttatcagacttcaggtacctcaaagagtgtctttttaccgtgtcttttctgatactcattacaggtgttaatcatttttttggccgcttcttttagcaaagaaagcattaaatcatcataatcaacgtagaatctggttgtttcagtttccgtttttatctcaccgatggcggctatttcggtggttaatttcaatttggcggcatcgatatctttattcgcttgtttaaccgtgttagacagggtggtaaagaaattctgcacagattttaacttgttcttcaattctggaatcagttttccttcaactacgcccgcagcaatagaataggaaatgattaatccaaatggaccggcgacgacaccggctgcggcaccggcatatgcttccttcctgattttatctacctgtgactggaaatagctgcttttttctgaaaaatcattggttaactggctatctaacgccagcagtttcccggaagcgttgttgaaactttgtgagcttaccagcagggatttttgcgcttcattcagcttcgtgatgccgtcatccagtaccttaatgagaatgtctttctgggcggatgctttcttctcattgtactcatcaaatagcaaaatatacgctgcgagcaattgcgtcgcaacaccacaccattcatacactgtttgggttgcttcaaaatacttatcctggctatccataagtaaggttttaatatcgccgactaaaacggaggctgcctgtgaatactcctgtttaaagcgacttaactcttttatggtttcatcaaaggtctgccaggggatgacctgatcgagatatttattataaagatctaatgctccatctgcggtttcgattgcgtttttaactacttctaccgttttatctgcaacgatttcagtcataatcattcgcctctttaaatatataaattgtaatgaaactcctgttttacaactattaataaattttacttcatctaattcatagttagccgggcgggatgcgtcaatgtctttatttctattaatatgataaatatcaaacaatgtttaatgtcattatggcgaatgcttctattctattttttagccgggtgatatttttcatttctgctggatgagcgtcgtcgccagaaggccacgtgagcacaagataagagaacgaaaaatcagcagcctatgcagcgacaaatattgatagcctgaatcagtattgatctgctggcaagaacagactactgtatataaaaacagtataacttcaggcagattattatgttgtttatcaagcctgcggatctccgcgaaattgtgacttttccgctatttagcgatcttgttcagtgtggctttccttcaccggcagcagattacgttgaacagcgcatcgatctgaatcaactgttgatccagcatcccagcgcgacttacttcgtcaaagcaagtggtgattctatgattgatggtggaattagtgacggtgatttactgattgtcgatagcgctattaccgccagccatggtgatattgtcatcgctgctgttgacggcgagtttacggtgaaaaaattgcaactacgcccgacggtacagcttattcccatgaacagcgcgtactcgcccattaccatcagtagtgaagatacgctggatgtctttggtgtggtgatccacgtcgttaaggcgatgcgctgatgtttgccctctgtgatgtaaacgcgttttatgccagctgtgagacggtgtttcgccctgatttatggggtaaaccggtggttgtgctatcgaataatgacggttgcgttatcgcccgaaacgctgaggcaaaggcgcttggcgttaaaatgggcgatccctggttcaaacaaaaagatctgtttcgtcgctgtggcgtggtttgctttagcagcaattatgagctttacgcagacatgagcaatcgggtgatgtcgacgctggaagagctatcgccccgcgtcgagatttacagtattgatgaggcattctgcgatctgacaggtgtgcgtaattgtcgcgatctgactgattttggcagagaaattcgcgcaacggtgctacaacgtacccatcttactgttggtgtggggatcgcccagaccaaaacgctggctaagcttgccaatcatgcggcaaaaaaatggcagcggcagacgggtggggtggtggatttatcaaatctggaacgccagcgtaaattaatgtctgctctccccgtggatgacgtctgggggattggacggcggatcagcaaaaaactggacgcgatggggatcaaaaccgttctcgatttggcggatacagatatccggtttatccgtaaacattttaatgtcgtgctcgaaagaacggtgcgtgaactgcgcggcgaaccctgtttgcaactggaagagtttgcaccgacgaagcaggaaattatctgttcccgctcgtttggtgaacgcatcacggattatccgtcgatgcggcaggccatttgtagttacgctgcccgggcggcggaaaaacttcgcagcgagcatcaatattgtcggtttatctccacgtttattaagacgtcaccatttgcgctcaatgaaccttattacggcaatagcgcgtcggtaaaactgctgacgcccactcaggacagcagggatatcattaacgctgctacgcgatctctggatgccatctggcaagcgggccatcgttaccaaaaagcgggcgtgatgctgggggatttcttcagtcagggagtcgcgcagctcaatttattcgatgacaacgcaccgcgccccgggagtgagcaattgatgacggtaatggatacactgaatgctaaagagggcagaggaacactctattttgccgggcaggggatccagcaacaatggcagatgaagcgagccatgctttcaccacgttatacaacgcgaagttctgatttactgagggtcaaataaatatagcggcaggaaaaaagcgctcccgcaggagcgccgaatggattagcgaccgaacagatcacgttttttcgctttaaacggctgggaaatcaccaccagcactgcgacaatcaggtaagcgataaaaataccgagcagccactgcggcatttccagacctaaaaaatcccactgacgctcggcgcaatcgccagaggcgacaaacacttgcggcacccacttatccagcggcagccattccgggaaacgaaccataaaatcacaggtggcaaacggcgaaggatagagctgaagcatggtgtgctcgtaagttaactgcacaccgcggaacgcactatacaaccagataaccatcgctacataacgcagcggagttttcggggcgatcgcgccaatcagcgcagcacccagaacgccgaataacgcgcagcgttcataaatacagagcacgcaaggtttcagtaacatcacatgctggaaccacagcgccgtcagttccagtgccagagcagtaaacgccatcaacagccacgcgccccggccttgtgaacattggttcaaaaatcgcaacataatcatttccctgcaatatgcatagagtgcgcagtttaaaccaattcattcgctgcgccaccaggaggcagcaaaaataggacgcaattggacaattatcgggcgaaaaggcaaaccgggcatttatatgcccggtaagttgttatcaaagcgttgctatccagcccatttgcataaaccattcggttacaggggcaagcgtaaactcgacgcagagcaagccgacgagtgtcaggacgagggtgtaaggcagggccatccacaccatgcggccataagagaggcgaatcaatggcgcgagtgcagaggtcagcaggaacaggaacgcagcctgaccgttcggcgtagcgacggagggcagattggtaccggtattaatggcgaccgccagcagctcgtattgcttcaacgtgatagcgccactttccattgccgctttcgcttcgttgatataaatcgtccccacgaagacgttatccgaaatggatgacagcagaccgttgaaaatatagaacagcgacagctgagcatgttccgatgcctgcaacacaaactgaataattggcgaaaacagttgttggtcgataatcaccgcgactaccgagaaaaacaccgtcaacagtgcggtgaatggcagagattcggtgaaggctttaccgatagcatgctcatcggtgacaccggtcaatgatgttgccagaataatgactgacaaaccaatcaagccaacttccgccagatgcaacgccagcgcagtcaccagccagacgccaataatcgcctggacaatcagacggattttatcctgacgggtacgctggtggcggctttgatcgtcaaactgttgcaacacttcgcggactttctccggcagcgtttcaccgtagccaaaccaacgcagcttctctaccagcaggcaggttaacaggccacaaatcagaaccggaacggtcaccggcgacatgcgcaggaagaaatcgccaaaatgccagccagccgctttagcgatgatcaggttctgtggttcgcccaccatggtcattacgccgcctaatgcggtgccgacaccggcatgcatcatcaggctacgcagaaagccacggaactgttccagaaccactttgtaatgcttgtcgatatgactatcgtcttgcaggtcggtgtcttcggtacgggaagaggctacgcggtgataaataccataaaaaccgactgcaacgctgatcaccaccgccacgacggttaaggcatcgaggaacgcggagaggaacgcagccgccacgcaaaaagagagcgacagcagcattttggagcgaatgcttaacagcaaacgggtaaatatgaacagcaacagctgtttcataaaatagatacccgccaccataaacatcagtaacagcaagacttcaagatttgccgccacctcttcacggacgtgttccgcgctggtcatgccgatgaataccgcttcgatagccaacagaccaccggggagcagcgggtagcatttcagggccatcgccagagtgaaaataaattccgctaccagcaaccagcccgcgacgaaagggctgatgaggaaaattaacgggtttacgattaagaaaatgatgagggcgagtttgtaccagtcgggggactggcccaaaaaattgcgccatagcgcgcggccccaggagatctccatgatggtttcccttaccttacaaataatcaatgatgtttttatgtttaaacgcaaagcttaacggtcaggcaggagtgaggcaagtcttgatagtcaaggggaaagagatgcggaaaatgaagccttgatccctttttcttctttttgtctgctatcagcgtagttagccctctggtatgatgagtccaactttgttttgctgtgttatggaaatctcactatggtcattaaggcgcaaagcccggcgggtttcgcggaagagtacattattgaaagtatctggaataaccgcttccctcccgggactattttgcccgcagaacgtgaactttcagaattaattggcgtaacgcgtactacgttacgtgaagtgttacagcgtctggcacgagatggctggttgaccattcaacatggcaagccgacgaaggtgaataatttctgggaaacttccggtttaaatatccttgaaacactggcgcgactggatcacgaaagtgtgccgcagcttattgataatttgctgtcggtgcgtaccaatatttccactatttttattcgcaccgcgtttcgtcagcatcccgataaagcgcaggaagtgctggctaccgctaatgaagtggccgatcacgccgatgcctttgccgagctggattacaacatattccgcggcctggcgtttgcttccggcaacccgatttacggtctgattcttaacgggatgaaagggctgtatacgcgtattggtcgtcactatttcgccaatccggaagcgcgcagtctggcgctgggcttctaccacaaactgtcggcgttgtgcagtgaaggcgcgcacgatcaggtgtacgaaacagtgcgtcgctatgggcatgagagtggcgagatttggcaccggatgcagaaaaatctgccgggtgatttagccattcaggggcgataatcccttccgtttaaagagcaaacccctcaaacgaggggttttttgttgtttttacagatttcccattcttggcgggcaacgttccagcaactcgatgctgccgtcttcgttttgctgttcgagcatcacatcaaatccccacaggcgatgcacatgcttcaggacttctttgcgcccccgatccagcggtgcgcgattatgtggaatataacgcagcgtcagcgaacggtcgccgcgcaaatccacgttccagatctgaatattcggctccagattacttaagttatattgcgacgataaccggttacggatctcccgataaccttcttcattatgaatagcggaaatctccagataattatgccgatcgtcatccagcacggtgaagaagcggaaatcacgcatcactttcggtgacaggaactggctgataaaactctcatctttgaaatcacgcatcgcgaaatgcagcgtttccagccagtcggaaccggcgatatccgggaaccagtatttgtcttcttccgttggcgactgacaaatccgtttaatatcctggaacatggcgaacccgagggcatacgggttgatgccgctgtaccacgggctgttataggggggctggaagaccacattggtgtggctgtgcaaaaactccagcataaaacgttccgttactttcccttcatcatacagatggttaaggatggtgtagtgccagaaggtcgcccagccttcgttcatcacctgagtctgtttttgcggataaaaatactggctcaccttacgcacaatacgcaggatttcacgctgccatgattccagcagtggcgcatttttctccataaaatagagcaggttttcttgtggttcggacggatagcggcgcgcttcagcaaccgttttctcttcctcgcgcttcggcagggtacgccagagcatattgacctgactttgcagatactcttcgcgacttttctgccgggctttctcttcttgcagcgagattttttgcgggcgtttgtaccggtccacgccgtagttcatcagcgcgtggcacgagtccagaagccgttctacttcatcaacgccataacgctcttcgcactcggtaatatatttacgggcaaaaatcagataatcgacaatcgaactggcgtcggtccagctacggaataagtaattgtttttgaagaaagagttatgcccatagcaggcatgagccatcaccagcgcttgcatggtaatggtgttctcttccatcaggtaagcgatacacgggttagagttaatgacgatttcataggccagtccttgctgaccgtgcttatacagccgttcagtctcgataaactttttaccgaatgaccagtgcggatagttaattggcatgccgacgctggagtaggcatccatcatctgttctgaggttatcacttcaatctggtgcgggtaggtatccagccggtagagtttcgccacccggtctatctctgccagataaacatccagcaggtcgaacgtccagtcgggtccatcgctcaaacgtgtggtgtccttattcatagaatcgatcgtcgccatacgcgcacctcattgttgtcggcgctctctgtgtggagcacctcatttcaagcatagaacacctgttaaaaaccgcgtcgccggagaatttttttctttgcgatttcttattatcagagtgccactaatccgcttctgaacggaattttatgctggataaaaagggcgttcagcaggagatactaaagacgccatattgccgcagagtcagggagatgtgagccagctcaccataaaaaagccgcatgttgaataatattttcaactgagttatcaagatgtgattagattattattcttttactgtatctaccgttatcggagtggctatgcgagttgtcatactgggaagtggtgtggtaggcgttgccagcgcctggtacttaaatcaggcaggacatgaggtcaccgtcattgatcgggagccgggggccgccctggaaaccagtgccgcgaatgccgggcaaatctcccccggatatgctgcaccgtgggcggcaccaggtgtgcctttaaaagcgattaaatggatgttccagcgccatgcgccgctggcggttcgtctcgacggtacgcagttccagttgaaatggatgtggcaaatgttacgtaactgcgacaccagccactacatggaaaacaaagggcggatggtgcgtctggcggaatacagccgtgattgcctgaaagcattgcgcgccgaaaccaatattcagtatgaagggcgtcagggtgggacgctgcaactgttccgtaccgaacaacagtatgaaaatgcgacccgcgatatcgccgtgctggaagatgccggcgtaccgtatcagctgctggaatccagccgcctggcggaagtggagcccgcgctggcagaagtggcgcacaaactgacgggcggcctgcagttacccaatgatgaaaccggagactgtcagctatttacccagaatctggcgcggatggcggagcaggcgggggttaaattccgctttaatacgcccgttgaccaactgctttgcgacggcgagcaaatctacggcgtgaagtgtggcgatgaagtgattaaggccgatgcgtatgtgatggcgtttggttcttactcgacggcgatgctcaaaggcattgttgatattccggtgtatccgctgaaaggctactcgctgaccattccaattgcgcaggaagatggtgcgccggtatccaccattcttgatgaaacctacaaaatcgccattacccgtttcgataaccgcattcgtgttggcggaatggcggagattgttggttttaataccgagctgttgcaaccgcgtcgtgaaacgctggagatggtggttcgcgatctctatccacgcggcggtcatgtcgagcaggcgactttctggactggtctgcgcccgatgacgccagacggcacgccggttgtcgggcgtacacgctttaaaaatctgtggctgaataccggtcacggcacgctcggctggacgatggcttgcggttccggtcagttgttaagcgatctgctctctggtcgcacgccagcgatcccatatgaggatctaagcgtagcgcgctacagccgtggatttacgccatcacgtccgggccatttacatggcgcacacagctaaggaaacgagatgacccgtccgatacaggccagcctcgatctgcaggcattaaaacagaatctgtccattgtccgccaggccgcgacgcacgcgcgcgtctggtcggtggtaaaagcgaacgcttacgggcatggtattgagcgtatctggagcgcgatcggggccaccgatggctttgcattgcttaacctggaagaggcaataacgttacgtgagcgcggctggaaaggaccgatcctgatgctggaaggatttttccatgctcaggatctggagatttatgaccagcaccgcctgaccacctgcgtacacagcaactggcagctcaaagcactgcaaaatgcgcggctaaaagcaccgttggatatttatcttaaagtgaacagtgggatgaatcggttgggcttccagcccgatcgcgtgcttaccgtctggcagcagttgcgggcaatggcgaatgttggcgaaatgaccctgatgtcgcattttgccgaagcggaacatcctgatggaatttccggcgcgatggcgcgtattgagcaggcggcggaggggctggagtgtcggcgttcgttgtccaattcggcggcgactctgtggcacccggaagcgcattttgactgggttcggcctggcattattttgtatggcgcttcgccgtccggtcagtggcgtgatatcgccaataccggattacgtccggtgatgacgctaagcagtgagattattggtgtccagacgctaaaagcgggcgagcgtgtgggctacggcggtcgctatactgcgcgcgatgaacagcgaatcggcattgtcgccgcagggtacgccgacggttatccgcgccacgcgcctaccggtacccctgttttagtggacggcgtgcgcaccatgacggtggggaccgtctcgatggatatgctagcggtcgatttaacgccttgcccgcaggcgggtattggtacgccggttgagctgtggggcaaggagatcaaaattgatgatgtcgccgccgctgccggaacggtgggctatgagttgatgtgcgcgctggcgctacgcgtcccggttgtgacggtgtaacttgttgtaagccggatcggaggcaacgtcttctgggtgcaaaaaaatcatccatccggctggtcagcaactgtagttgttaatgtgacagagccattgcccatgatagtgtccattaaaaggatggacactatttccccggaacctgaactcaccgcacaggcgttctacataaaacgcttacgcttcattgttgactcgaactcgacttcagataaatcacgctttacccttgatggagcctgtacatagatttgtgtaattgcctgattttgatatgttcaattcaacatcaaatgaaggttaaattatggacgacaaacaattgcaggctcaggctgcgttcagcaaagcatcgcaaccggcgatagatgcttcattaaatttaagattcagcttcctcttcagccacccgtacgccaatcttcaacacttcattatcttctttctcggccaccgtccagatcatcccggcaaactctacctggtcaccgacaaccggtgccgcgcctaacaactgctggacaatttcacccagcgtttgctgcttatcacgatattctcgcccgtcttccaggccatatatcagcgcaacatcagcatatttggcgctggcttcgagaatgaagtcaccaaagaagcgttgatccagcgcgaccggcggcgactggctgaacagtttaccgagcgccggaagatcgcgttcccgaccaattacacacaacacatcgccttcgcgcagtcgggtgctgccggtaggatgaagcaactggttatcacgaaacagtgccgcaatacgcgtctcttttggcatatgcaaatcgcgcagtgccgcgcccacgcaccatttatcggcactcaattgataaacaaactgctcccacggattttccggatgaatatccaggccaacgcgtgacaccggacgtcccactggcggaaccaccactttggcttttttagccgcccacgagagtgatgttccctgcaagagcagtgaaaccagaaccacaaagaaggcgacattaaagaacagacgtgcattctccagccccgccatcatcgggaacacggccaggatgattggcaccgcgccgcgtaatcctacccagctgataaacacgcgctcacgcagattgaaaccgcggaaggggagcaatccagcaaataccgaaaggggacgggcgaagaatatcatccatgcggacaaaatgagcgccggaatggcaataggcagcagatcgcttgggttaaccaacagccccagcaccaggaacatggcgatttgcgccagccaggcgaggccgtcgaaattttgcaggatgccgtagcggttgcgaatagggcgattacccagcagaaaaccgcacagatacaccgccagaataccgctaccttccagcgcagtagttaatgagaaaatcagaataccgccacttaatgccagcaatggatataatccggcgggcagggcgatgcggttgatcatttgcagtagtaaataaccgccgccaagacctattacaatgcccagaccaaattgttgcagaatatcgacaatgaacatccagctaatattgctctcatgatgctggatcatcgcaattagggtaatcgtcagaaagaccgccattggatcattactgccggattcaatttccagcgtcgagccaacacgttcgttaagccccttaccacccagcagagaaaagaccgctgcagcatcggtagagccgacgatagcgccgattaataagccttcaatcaaatcaagattaaacagccacgccgccatcatgccggttaaaccagaggtgataagcacgcccagcgtcgccagcgacagtgccggtcctaacgccacacgaaaggaactggcctgagtgcgcatcccgccgtcgagcaaaataatcgccagtgccaggttacttaccatgtaggcgaaggggtaattatcaaacgggataccgccgacgccatcgactcctgccagcatgccgatcgccagaaaaataaccagaataggaatgccaagacgggaagaaaatgaactaagtaatatactgctggtgacaaggatggatcctaagatgaaaaggctaattattgttgtggcatccaacggtcggttactcctgattacgctgtctcttatataaaccctaccatattagcggcagagacagcgttttacttagccctgaagcgtgatttttttacattttaagaacaggatgaccgctaatcgtcaactgagtgccttcccgggtgttattcagaatggcatgtgcgcccaacggcagcgtaaccgtgcgttgttcatgaccaaaatcgaggccggtaatgagtggaatcgacaggcgggaacgcaaaaacgcgtacactgactccaggttgtaacctgcgtcataatcattgggcgtgctgccgctaaagctaccgagaataatcgccttctgacgtggcaaaattcccgcatgatagagctgcaacagcatacgttcgacccggaaagggtgctcgttaatatcttccagcaccagaataccgttctcaatttttggcatccacggtgtaccgatcagtgaaatcagcatcgcaagattgcctccccacaacgtgccttcggcccgacatgtcgggccttccccttgccattcaatggtgaaggtttcattgcgtaacgccagccagaaatggtgctcggtaaaggcgttcagttcatccgcgccaaagtttgctaccagcatggggccgctaaaggtgatgacattgccatgcgccagaagaccgcactgaatggcggtaaaatcgctatgtccgcaaatgagcaacgggtcatgttgttggcgagccaccagtgcctgccagtcaatatctgccagtaaacgactggcaccgtaaccgccgcgtacagccagcacgatggtgttgggggtagtcagtctggcaagggaattgagatcttccagacgctctgtttccgtacccgcaaaacgctcacaacgacgggcaataacctcgacgttattgacttgatgccccgcgtcggtaaggcgctggataccacgcagcgcggcgtgctgtttaatgcagtaacccgatggggcaattaagtgaaacagagacatggcaattccttgctgacaacagaaacgaaatgtatatcatgccgcttaggtgtgccgttgtcacctcaacggcgattccaggctataaggatagaagaagtgaaattgagatggtttgcctttttgattgtgttattagcgggttgttcatcaaagcatgactatacgaacccgccgtggaacgcgaaagttccggtgcaacgtgcgatgcagtggatgccaataagccagaaagccggtgcagcctggggcgtcgatccacaattgatcacggcgattatcgctatcgaatcgggtggtaatccgaacgcggtgagtaaatcgaatgccattggtttgatgcagttaaaagcttcaacctccggacgtgatgtttatcgccgtatgggctggagtggtgagccgacgaccagcgagctgaaaaatccagagcgtaatatttcaatgggggcggcttacctgaatattctggaaaccggcccgctggcaggcattgaagatccgaaggtactgcaatatgcgctggtggtgtcatacgctaacggggcaggtgcgctgctacggactttctcgtcagatcggaaaaaggcgatcagcaaaatcaacgatttggatgctgacgagttcctcgaacacgtagcgcgaaatcaccctgcgccgcaggctccgcgctatatctacaaacttgagcaggcactggacgcgatgtaaatcagtcgcgcactttgtccgctttttcccgggcttctcgctcgagagagaaaataatccgctgtaattgccgctccaccgtcgggctgacgttaagaaaacggaagctcagacggggagtggtgatggtttcattcttgccatcaatcactttgcgctcgctgatggagattaactgggcgtcaaagtgaaaaacaccccattgccccatgttgacttcaatctgagcgaagcgcatgccttcttgtaattcggcaggctttgctgtttccagtaatgcgcccatgccgcctaacgacaaatcatacaggcggaaacgtaacgtactgttatccgccagtttggtctggcaaaaataaggcggatggagtggggcggagatgcggaaatatcggcgtcgttgtacaaaccataaggtgggaggcggtacggtaataaatgccggaagctgcaagtattcactctgctgtagttgttcaacagtaaactcgactttcgcaccctgagtttcggcggtaatggtaatgtgctgtgcctttagcacggcgatgttgtcttcggcttgactgccgaaatccagcaccagtttatccggggttattgccagtaatttgctgatcagctgcccgccattccaactgagacgcaaaggaattgcggctttgtgcaaatcgcgtaacacgcccaggacggctaacggattttgtttcaggaactgctcatggtaatgactcacgcggaaaaactcctgactgacaaactgtctttggtttatcggtcacagttaacaaaacttaatacaaatgcgtgaatattttttacatgttgttcttaaatcagccgacatacgcccagcatcgatcccgcccttgcctatacttagagcgttgatgtaagcatttcttgcgtccgattcatcgaaacgagggcctgaacatgggaattattgcctggattatttttgacctgatagccggcattatcgccaagctaatcatgccggggcgtgatggtggtggatttttcctgacctgtattctcgggatagtcggtgcggtggtcggcggctggctggcgaccatgtttggcattggcggctccatcagtggttttaatctgcacagcttcctggtggcggtggtgggagctattctcgttctgggcatattccgcctcctgcgaagagaataagattttcataaggcggatagcgatacagatgccgctatccgctttcacatcagaacgtatactcgacacctgctttacgggtgaaaaaaatcaatatagcacttcgatatccgataaagtcggttcccggtaacaacaacagaatccttttttaattattgtttcgttgtttttggtgtgattcagaaaataaatattttagacagtagccagtcaggcgttaaaaatggggcggatagtgaggcggttttggctgcgcttattgaacatttagaattgatcaatccttctggcagattaagccaaaatacccgttcggcaatgcttcagttacgcgaagaggaatggtctgaattctttttttggttgctaaattctctggagtgtctggattatgtgattattaatttaactccagaaagcaaaaaaacgttgatgagtgaacaccgtaacaatattcaggtagcaattgatgctttatatagccaacgtcggcgtaaatcgccgggtgatgaaagtgaaacacttacccgtagaaatgacgctatcttcggcaaccacgtatggcaaacatttgcgcaatacttcccgccaggacttgaaaaaccgtctgtgtagaaaaaaccatagctatggtgttatctgccgacaacgccatccggagaagccgaatgacgttgtcggagtaagcgctggttaaggtgtgggttgtgcctctttggttgagggttgcgtcgttgctgacttaacggtcggacgcgtcgccggaacattgtcacacggttgctctttcgggcagatcaaatccagcattttcagcgtcacgccattggtccagccaaagccatcctgtaatggatattcgccaccgccgccccccgttccggtggtgctgacatcatatttttccaccagctttttctcccggtcataggtgtgctgaacattggtcaggaagtgccagctaatgtccatcgccacctctttttgcccgtagttttgtaatccttctgtcgcgacccactgtaacggtgcccagccatttggcgcatcccattgttgcccacttttcaccgacgtggtgttcaggccgccgggttgcagcagatgtgttttcgtcgccgtcgccattttgttggcgcgatctttcgctgccgcattgacgtacagcgggaacagggcggccgcggttaactgattgcgcactttatgacttttcaggtcgtaatcggcataccagccttgttgatcgttccacaggtatttttcgatccctttttgacgggcatttgccagcgtttcgtactggtttgccatcgcgttatctccggcagctttgctggcgcgggcgaggattttttccattttaaacatcaggctgttcagatcgaccggtacgatgctggtggtgcgtaaggtatttaactgctgcgggttgtccatccagcgcgagctgaaatcccagccagacgcagcggcagagcgcaggtcgcggtaaatttcagtggcaggtcgattcggattgcttttggcggtggcaatatcttccacccatgactctggtcgtggcgtatcgcgatcgtcccagtagcggttgagaagggtaccatcctgaagtttgacaacgcgtttttcctgttgtccggcttgcaggttttcaacaccgtccatccagtaagcatattctttttgcatttgcggcaggtattgcttcaacgcggcatcgccttcatgctgcgccagtaactctaccatcagggcaaagaagggcggttgcgagcggcttaaatagtaactgcggttgccgttgggaatatgaccgtaagtgtctatttcatgagcaaaattggccaccatatccgcgactttatcccagtgaccgctttcggcaagtcctaacatggtgaagtaactgtcccagtaatatacctcgcgaaagcgtccgcccggcacgacataaggttccggcagcggtaacagagaatcccatttttcggtgttttcggtagaacgcgttaataccggccaaagtccgtcaatatgttcgcgcagtgactgcccctctggcggaacatatttctcgccttctttcggcagggtgaaattgacgttaacgaaatggcgcagatcaaatccgctctggttttgctgcatccgataatcagcaaggatcatcagcggatcgctgttcggcacggcatcggcaaaggttttttggtccggaaaaagtttggcgttttgcacatcattaaacagcggccctaataaaatatcaggcggctgtggtgttaccggtgtttcttctgcctgcaccgatagcgcagcgaaacacaaaaagatacaggctggaattaacgccattttttgcgggcgagaaggtgcgggggatttcatcaatcattctcctttggcgaaaccgaataaaacggtattcaagtatcagaaaaccttagttcaggatcgcactagctgcatgatcgaaatctcattctgcgaactgtcaggcattttagaaaagggaattaaagggataaataacggcgaaatagagtgatcaaataacgtctgtttattagccagccagcggcgttgggttcgtgattagcgaagaaaaatcatcataaattggtgaaaaatataacaggtagttaaaaaccattagtgctgagtaaattgccggatgacatcagaacgatgccatccgaacagtggcttaaccctgacggttgaaacgttgcgttttaacgtccagcgttagcgtttcttctggttgtatcgcatacagtttctcaccctgctggcaaatccagccaatccccagttcacgggcgattagggcgctgtgggataccggacttccggcgctaaggcagataccttttacaaccgccggatccagttgcagtactgtggaaggataaatgttctccgccagtagaatagttggcgagttaaactgcgggagttcttctttcgtttgggtcaggtggaccagggtgcgatgcagaagatcgtccacatcaatatagcgagcttgtagatattcatcatccagttgctggtattgctggctaagttctttaagaacttgctgccaggcatattctgccgtgcaatgttcatgctgaaggagttcgcttgccgccgccagcagttccggatcatctaacagtgtatggtgaccagaaaagattgcggcaatatcgtcaagcccgctggcttctgctttcgctgttaacgtcatcagatctaataacgtgaagtcaatagcctggcgtaatcgatcttgttcttcttccacggtcagggttgattttgcctgtaccgtacataaaactggttgataataaaaggctttacccgaaacaggcggaacgggacgcagagtaggtggagcgacttcctccgtttcaccaaagttatcttcagccagctgacggaaagcgatcagtgcctcttcagcttctggccctttcgcaatcaggcgcagcgtatcgttatagcgaacttgtagtaacgcaatctggttaatactctctggtgtgacgcatttgccgtttttttccagcaacatatcggcattaaatgtcgataaggtataaaccagccgggaggccggacgtacatgcaggccgttacggttttttatgaccaccgccagagaacgggcttcttcatcgtacgcaggacatgtgtcagagatttcagtgtcggaggacggtaaacccagttgttcacgtttggcttccagcgcatgcatggcgtcaaagataactttgtcgatatccgcccccgaggccgcgctgaccgttgctgccagtgtaccttcgaccaacggcgcagcacacaaacgtacttttgcggcgatctcgggagccagcaattccagcgcagtttcagcactcaataatgcgctacccatatccatcatgaccagcacatggtcggcatcagcaacagattcgatggcctccatcactttgacggcatcggtaccaatgggattttgtggatcgtcaattcccgcggcaatggcgattttacaactatcactcattaacatctgacgggctaattcaccgacaccttctcccagtcggctgctatgtgaaactatgaccaggtttaccatcaccaattccttactcttttgcggctaacgccaacatttgcatcataaacatcaccgaggtcgcgccgggatcctggtgaccaatactgcgttcaccgagataactggcgcggcctttgcgggcttgcatcgtaatcgtactttgtgcagcggattcggcgatgctactggcagcttcgagcgccaccggaacagagagattttgctcgctggactgacgtaacgattccaccaccggcacccacacatcacacatggttttatcgccaggttcggctttcccgcgactgattacgccgtccgcgccatcgcggaacatctgataaagctcttccagtgtcaggctttgccgtgcctgggtcgcctgtgcggcgcggataaagaaggtaccgaacagcggaccactggcaccaccgacgctggaaagcagcgtcataccggtattcttgagaatgaaaccgatatctttatctgcgatagcagggagtttttccaccactttgctaaagcctcggttcatatttagcccgtggtcagcatcgccaatttcgcgatccagtccggtaagatactcgctctcggtgctgaaaatatcgccacaacgagtgagccagttaacaatttgagttctgctcagtgacattgctttctccttatttaccccagttaagggccggggtgtggaccggggcgtcccagagtgccagcgtttcgtcatcaactttcagtaaggtgattgagaaaccggtcatatccagtgaggtgcagtacgcgccaattaaattacgttcgatagtcaatcccgcttgctggcaacgtgtggtcaggcggttatagacgccgtacagctcagaaagcggagttgcgccaagattgttaaccagcgcaatcacccgatcgccagactggagcggttgtttggtttgttgttcttcctgccaactgccttgttgataatcccagaaacgcaaagtgcgatggtatgagccatttaccagcagggtgtcgaacatttcatcgacggtttgatcaagggaagagaaggggcggcggtcaatacccggctcaccatgaatgccgacgccaaactccatctcattatccgccagggtaaaagaaggtttgcccgcggcaggaacggtacaggcaccgagagcgatacctattgagtggccttgattattcagcttacgccccagttccgcacaggcgtccagtgagtcgccacgctccgccgctgcgcctacgagtttttcaattaatacggtgttggcaacgccgcgtcgcccggcagtataaagactgtcttttaccgcaacgtcgtcatcaatgaccacagtggtcacttttacgccgctatcgtgcagtaactcggtcgctgtttcaaagttaagaatatcgccggtgtaatttttgataatcaacagtacaccttcgccgccatcaacttgcatggcgcattcaaagattttatcgggcgtcggtgaggtgaaaatttcgcccggacaggcccccgaaagcatcccctgaccgatataaccacagtgcatcggctcgtgtccgctgccgccacccgacagcagggcgacttttcctgcaacaggggcatcagctcgggtgacatacaccggatcctgatgcagtgtcagcgatggatgcgctttcgccagtcctgccagttgttcgtccagtacgtcttgcacatcattgatcaattttttcattattttgctccagcaattacggtagggcatggatgatgttcaacgacacggcgaccactgactgccgatgaatccattgtgcatcaggcaagggaaaagaaaattagcccaaattatgtttcatagtgaaacatatgctttaatgaatgttccatattgaaacttttacgtgtattaatacttaaaattgcgagccggaacaccttttgtcataagggatgcgggatatgagtggcgcttttaacaacgatggtcggggcatatctcccttaattgcaacctcctgggagcgatgcaataagctgatgaaacgggagacatggaacgtaccacatcaggcccagggcgtgacatttgcttctatttatcggcgtaagaaagcgatgctgacgctcgggcaggctgcgctggaagatgcctgggaatatatggcaccgcgagagtgtgcgctgtttatcctcgatgaaaccgcctgcattctcagccgtaatggcgatccgcaaaccttgcagcagctaagtgcactgggattcaatgacggcacgtattgcgccgagggaattattggtacttgtgcgctatcgttagcggctatctctggtcaggccgtgaaaacgatggccgatcaacatttcaaacaggtactctggaactgggccttttgtgcaacgccgttgtttgacagcaagggccgattgacgggaacaatagcgctggcgtgtccggttgagcaaactaccgcagctgatttgccgttgacgttggcaatcgcccgcgaggtcggaaatttactgctgacggacagtttgctcgctgaaactaaccgtcatttaaatcaacttaatgccctgttagaaagtatggatgatggcgtgattagctgggacgagcagggtaatttgcaatttattaatgcccaggcggcgcgggtcttgcgccttgacgcgacggcaagtcagggacgggcaatcactgaactcttaacgttacccgccgtattgcaacaagcaataaaacaggcacatccgctcaaacacgtagaagcaacctttgaaagccagcaccagtttattgatgcggtgataacccttaaaccgataatagaaacgcagggaaccagctttattttgttgctccatcctgtggaacagatgcggcagttgatgaccagtcaattaggaaaagtcagccataccttcgctcatatgccacaggacgatccgcaaacccgccgcttgattcattttggtcgccaggcggcgcgcagtagctttcctgtcctgctttgtggagaagagggcgtgggcaaggcactgctaagtcaggcaattcataatgaaagcgagcgtgctgcaggtccttatatcgccgtcaattgtgagttatatggtgatgctgcgctggcggaagaatttattggtggcgatcgcacggacaatgaaaatggccgtctgagtcggctggaactggcacacggcggcacgctgtttcttgaaaagattgaatatctggcggtggagttacagtctgctttgcttcaggttatcaagcagggggttatcacgcgactggatgcgcggcgtttaataccaattgatgtcaaagtgattgcaacaacgaccgcggacctcgcaatgctggtggaacaaaatcgttttagtcgccagctgtattacgcgctgcatgcatttgaaattaccatcccgcctctgcgtatgcggcgtggcagcattccggcgctggtgaataacaaattacgcagtcttgaaaaacgcttctctacgcggctgaaaattgatgacgatgccctcgctcgcctggtttcttgtgcatggccaggcaacgattttgaactttacagcgtcatcgagaatcttgctctgagtagtgataacgggcgcattcgcgtcagtgatttgccggaacatctgtttaccgagcaggcgacagatgatgtcagcgccacccgcctttccaccagtctgtcatttgcggaagttgaaaaagaggcaattattaacgcagcccaggtcacaggcggtcgcattcaggaaatgtcggctttacttgggatcggccgcactacgctgtggcggaaaatgaagcaacatggcattgatgcagggcagtttaagcgccgggtatgaaagacagaaacgatttctgatacatcagagtgatctgtatttcattccggcgcacgctaacaattttcagcatcgtttaagggcttgtctatcccgcacttaaaagctgaagcgatatcctccgttgacttgcttctgatcaaagaggttaccctgcgtgtaatccgcttcgagatagaatgtgtgctgtttgttatactgtgcactgactcccacgccgttattccagccattacctttgaaactgtacttctcccgggagttgttcaacagatattcggtatcccctgaaaactcgcggatagcgccagtcttcacatagacattcagctggctgttgcctgcggtgatgtcataccccagtatcatgctggcacgccccagcagcgattcgtagtgattcagatgtatattgaggccattactcgccttcatagtcatctcattctggtggctgtatgtaagctgggtttgcggctctatatagaacccataaccagtaggggacaggttgaacctctgcccggcttccagggagatgctcattccattcgcagtgccgttggcgttaacgccgttgttctgactgtccagtacgtggaaactatttttctggcgcgatgcttttataacgagatcgctgtaaaaaccgttttgtgccatgtaactggcgtacattcccatgtagtctgaacgtgcggtaccgtcgcctccgctatagtccggcgatgcatgtgttgagccaatatacagaccgacatacaacggcattacatcagagagacgtttatccccaccaaactggataccgctgtaacccatgtcaaagccgctcagtttgccactggcaaaggagtccaggcttcccccataactgcgcaaccagatattaccgtctttactctgatttcgcaggtcacccatccgttgcatcagcgtacggttttcaacatagttcaataagtaaccgacattgagataattgccgccagcatctgcggtcgtggtgggtttaggcgtgggagcgggttcaggcgtaggatcggggttgactatgggaggctgagcgggagctggtgtgggttcaggattaggagtcggttccggaactgtcccggaagcgtaaagctcccagttagtgccatttttacgcacatcgtacagatatccccccaactcaacctgagaagacgcgctgaacgaggccgcgccgtcagtggtttttaccactgtcagaacttcatttcccgttgtggcctcgctgccctggttgcggatagccaatacgtgattaccagcactactcccgctgatattcaataaatcccctttattattaacgccattaccctcgccaacaacatcagcacgcataataaaggtactgttaccgctcaggttctctacgtttaatgtggcaaatgtgccggcagttgacccgtggctggcaaaatcgacagttgaatggctcagcgccagcgtgtcgagattagaattacttgttacgttccagacgctgttattcattgcaacgtccagttttccgccattgacattatcgctgagggaggaacctgtccaaaccgacccagggtgcatatccagattgattagcccacctttggaaagaacgctaccgttgataagcatacgacccgaggcgttgatgcggctggcggcataaccatcgtcatgttgcgttgcgatggccatctggtcgggtgtactcatatcaatgaccagatcgctcgtgaggtcgatctggctgttggtcatggcataaattcccctggctcctgccgcgccggtgatagccaaactgtctccggttattctaccgccgctgagagcccacaaacccagcgccagactgccattacgatcaactgtaatatcggtattttgcatgttgacaacagccgttgccgtctgggccgaggcaccataagaaccgccggaaaagatgctgtttcgttgcgctgccgtgccagtaaaattgattatcgcgtctgaaccactggtgacgaggccaccgccctgcgcggaagaaatatggctatctgcaccgatagtggttgtaccaccacgaacttcgacgccattggccgcggctccagttacatcaacagtgagtgcattcgcgctaacctggccaaagctccagaggccgtgagcattatcgccattggttttaatggtactgtttgttccgagatcgacaacagagtttttctgtacgtttatccccatggcgctgtagccctgaacatcgattgtcaggtctgtagccgtaaaacgcgcagcaccattggcgttattgccgttgagaccaccgatataaacacctgtacttccatcggtcgtgattttacttccgcttccaagatcgacactggtgccatagtcattgatggttaggcctataccgttcgagttttcaatggtgaattgagtggctgttagtgttgagctatgcccaataatgatgccgtcatcgttactcttaatggtgctgcctgtgcctaagtcagcatgggtatagtcaccaattaagttaatgccgatggcagaggtttgaccaacaacatctactgtgagtcggttagctgtcagggagctgtttttgccctgaataatgattccttttgcatatccagaggcgtcgttgacattgacggtgacatcattacccaggttgatattgccaggcgtgtttcctgctggggtcattacaccatagaggtttcctgatggatcggcggtatctcctgtaattctgtcaccatcattaatagtaatattggtgccatattgacttcctgtatcagcagctatcagcaggggggaaaagataattgcattcaaaccaatagcgccaaattttatcagttgaattgagggcgaacggatttttaattcagcgagacgatctgctttggtattcccattgtgttgtttgatgcccataccactcctatatagtacccagactatgggtctatggattttgtcattttgtttaaatcaatgaataatatcctcttatcatcatgatatttgtatggtgcaatcatgatgagcttctcagagaataattctctattaccgggcaaaatcaggaacacaggaattaatatatatttaacatcccccttacaaaggtgagtttatatcgagttattccctaagttgtcgttacttattccaattcgttactataaatatggcaaaaatattacaacaaacagcggttaaaaaatttggtgaagattttttgtaataatcctaattagttatgggaatttcgcttgatgtatctgcataacaaaaacaatatgcgccatttttgcattactaataagaaaaagcaaaaaacatcgatattcatttttggtcaatgggttttctggcctatcgttgttattgtgctactggttatcattttcatcttgccagcatattggagcgtgatcaattttgatcagctgtgaagggggctgatgtgtagtgatacaaaaacttacgttatatcactgctaatgagatatccggcatctgaacacttatgtctttaattattctcgtggttcactataggcaataagcacaaaagtgtaggatgttacaagaatgattaggactcggtgaaatgaaaaatccacgcaattgcgtggattttatatacttttgcgctcttcatgagatttagcgaaacctcatgagacaataaattaattagacgttgaaaaggaagttcatcacatcgccatctttcacgatgtaatctttaccttctgcacgcattttgcctgcttctttcgcgccttgttcacctttgtaagtgatgaaatcttcaaacgagatggtttgtgcacggataaagcctttttcaaaatcagtatggattttgcccgctgcctgcggcgcggttgctccaaccggaatggtccatgcacgcacttctttcaccccagcggtgaagtaagtttgcaggttcagcagtttataaccggcacggatcacacggttcaggcccggctcttccagcccaagctcctgcataaactcgtcacgttcttcgtcgtccagttcggcaatgtctgcttcaacagcagcacaaaccggaaccacaacagaaccttctttcgccgcgatttcacgcacctggtcaagatatgggttgttttcaaaaccgtcttcgttgacgttggcgatgtacattgttggtttcagcgtcaggaagctcaggtaacgaatagccgctttctcttcagcgcttaaatccagcgcgcgcagcatacctgcattttccaactggggcaggcatttttccaggaccgccagctcagctttcgcgtctttatcgccacctttggctttcttctgtacgcgatgaatcgcacgttcgcaggtgtcgaggtctgccagcgccagttcggtgttgataacttcaatatcgtcagccgggttaactttgccggaaacgtgaatgatgttgtcattttcaaagcagcgaacaacgtgaccgatcgcttcggtttcacggatgttggtcaggaactggttacccagaccttcgcctttcgatgcgccttttaccagaccggcgatatcgacaaattccatggtcgtgggaagcgtacgctgcggttttacgatttcagccagttgatccaggcgaggatcaggcattggtacgacgcctgtgttcggctcaatggtgcagaatggaaagttggccgcttcaataccggctttggtcagcgcgttgaacagggtagatttcccgacgttgggcaaaccgacgataccgcatttgaatcccatgatttaaatcaccttaatatcttaataatcaacctgttattgctaacagattgcagaaatggaaataactttgcctattatacacggcactcggcaaaaatgccgcagacaacgacttattgcgctttaaaggcgtgcaatcggttcgttgctttggtcaagccatctgtaaaccacatttcagtacaacgcgccgcttcgtcaatggcttcatcaattaacttctgttcactaacaggcggtttgcctaacacaaaaccgacaactttatttttatcgcccggatgaccgattccgatgcgtaaacggtgaaagttagggttattacccaatttactgatgatgtctttcagtccattgtgaccaccatggccaccgcccaatttaaatttggcgacgccaggaggcagatccagttcgtcgtgggccaccagaatttcgtccggattaatgcggaaaaaactggccatcgccgcaacggctttgccgctgagattcataaatgtagtcgggactaacaggcggacatcttcgcctccaagagtgactcgcgaagtataaccaaagaatttagcctcttcgcgcagcggagcgcgcaaacgctctgccagtaagtcaacgaaccaggcaccagcattatgtcgcgttgcggcgtattcagcaccggggttcgccaggccgacaatcaatttaatcgtcacgtttttttgtcctgagtgtgtacataactggcgcgtagtttactggttgcggccccgcttgacaaaaaactgcgtatcaaatgcagataacgtaataattgcctgagtggactattagaaagtcaaggtgttcaggcgtttatttgtaaagttttgttgaaataagggttgtaattgtgatcacgcccgcacataacccactgggtgttgtctatactttacacataaggaagaggggtattccctgttacaacccagaaagttccggaggtgacatatgaaacgcaaaaacgcttcgttactcggtaacgtgctcatggggttgggtctggtggtaatggtggtcggcgtggggtattcaatcctcaaccagttaccacagtttaatatgccccagtatttcgcacatggtgcagtgctaagtattttcgtcggtgccattctctggctggcgggtgcccgtgttggcgggcatgaacaggtgtgcgaccgttactggtgggttcgccactatgacaaacgttgccgccgtagcgataatcgccgtcatagctaacaaataatgcagtttgctgaccagtcagtttgcgctgactggtcaatctcgtacttataaatccgccatcgccgcgcgacgattcgggaagaacgccaggcgtcccgggatcggttgaatgccagcgcgagccatagtgcgcagtggctggaattccacgttgcacacgcgcagttcacatccctcgggcagacgcttcacaaaacgctggaacgcatcaagaccaccagcatcaagtaccggaacggcatcccacttcagaatcacaatccgtttgccttcaagacgtgactccaggtccgtgaataagccttcagcagcagcaaaaaacagcgggccaataacgcgcagaaccaggacatcgtctggaacatctacgactaccggtgccaggcgagtcatacgtgcgatacgacgcataaacagcagcgatgccagcacgatccccacgctgatggcaataaccatatcaaacaacacggtcagcgacatgcacagcagcatgacgatgatgtcatctttcggcgcatgacgcagcaagtcgaccactttgtgcgcttcactcatgttccacgccaccatcaacagcagggctgccatggcggaaagcggcagccaggagagcagcggtgccagtaccagcagggcaagaataaccagaatagagtggatcaccgccgagataggggacgttgccccggcacggacgttagcggcagaacgcgcgatggcagctgtagcggtaataccaccaaagaacggagcgataatattccccagtccctgtccaaccagttcgctgttcgccttgtgtttcgtcccggtcataccatccagcaccacggcgcagagcagagattcgattgcgccgagcattgccattgagaatgccgcaggcagcagtgtgcgaatagaatcccaggttagcgtgaattctgaattaggcagatcccacggcagcaccagttgcggcagcagttgcggaataccgttaccctgagaaccatcggccaggacgtagtggaattgcgaaccgatggtagcaacatgtccgccgagcaggttaacaatccccatcaccgcgcaaccagccagcaaggccggaaggtgaccgggtaaacgaatgcccagacgcggccaaaaaacaagaatacctagcgtcacaatgccaatggcagcatcacccacattaatggtcggcagcgccataaataatgcgccgactttttgtagataatgttccgggacatgggccatttgcagaccgagaaaatctttaatctgcatggtaccgatggtgatcccgatacccgaggtgaaacctaaggtgacggaaaccggaatatactcaatcaggcgaccaaagcgtgccagacccatcagaatcaaaaagatccccgacagcaaggtcgcaaccagcagtcctgccagtccaaactgttgcgacacgggatagagaattaccacaaatgccgcagtcggaccggaaacgctaaagcgtgacccacccgtcagagcaatgacaatccccgcaacagctgcggtatataaaccgtactggggtgccacaccactaccaatagccaacgccatcgccagcgggatagcaataatcccgacggttatcccggcaatcaggtcacgggtaaaccgtgcggcagtatatttttctttccagcaagcgtcgatcagagcgcggaaaggcatcacatgtgaggaaaatattttgttcacaataatgtttcatccgtgagcgcatcatctgtcaactaaatggcaggtgaaggaggcataggtcatacaaatggatattacagacaaaaaaacccgccgcagcgggtctttgagccgggttcgattagtgttcgaacatggcagagatcgattcttcgttgctgatacgacgaatcgcttcggccagcatacctgacagggtcagagtacgcacgttcggcagtgatttgatttcatcgctcagcggaatggtatcgcagacaacgacttcatcaattacagagttacgcaggttgttcgccgcgttgccagagaagatcgggtgagtcgcgtacgcaaatacacgtttagcaccacgttctttcagagcttcagcagctttacacagcgtaccgccagtgtcgatcatatcatcgaccagtacgcagtcacgacctgcaacgtcaccgatgatatgcatcacctgtgaaacgttcgcacgcggacgacgtttgtcgatgattgccatatcggtatcgttcagcagcttagcgatagcgcgggcacgcacaacgccgccgatgtccggagaaaccacaattgggttatccagattcagctgcagcatgtcttccagcaggatcgggctaccaaatacgttatcaaccggaacgtcgaagaaaccctgaatctgttcagcgtgcagatccactgtcagcacacggtcaacaccgacgctggagaggaagtctgcaaccactttcgcagtgattggtacacgagcggaacggacgcgacggtcctggcgcgcatagccaaagtaggggataacagcggtgatacgacctgcggaagcacgacgcagggcatcaaccataacgactaattccatcaggttgtcgttagtaggggcacaagtggactggatgatgaaaatatcaccaccgcgtacattttcattaatttgtacgctgacttcgccatcgctaaagcgacctacagcggcgtcgccgagtgaagtgtacaggcggttggcaatacgttgtgctagttccggggtggcgttaccagcaaaaagcttcatatcaggcacgagaagaacctcaggcatgcgtccattggtggaaagaatctgccgaaaactgtgcgggccaggcatgatcctttccaggcggtgtattaaagagcgcgatgcaacgtctggaacaaggtgacgttgtcaccgaaactcagcttgcccggcttaaagcatggctctgtgcaatggggaaagattagcgcctttcgccacaaagccattgagccattccggggcttgctctagcacctggcgggcttcagactctgtatcaaattcagcaaagacacaggcccctgtcccagtcaggcgcgacggggcgtattctaacagccaggaaagcaccgcatcaacctcgcgaaaacgttttcttgcgataacctcgcaatcattgctgaattcacattttagcaacgtttctattgacctttttggcgtattgcgcgggagttcaggatctttaaaaatcaccggagtcggaatacttacaccagggtgcgccaccagataccacttctctggcggatccaccggcgttagtatttcaccaacgccttcggcaaacgcggcatgcccccgaacaaagacaggaacatctgcgcccagcgtcagccccatttccgccagctcatccatgcttagcccgcattgccagagatgatttaatgccaccaggaccgtcgcggcattggatgaaccaccgccgagaccgccgcccatcggcaaacgcttgtcaatgctgatattcgcaccgcttcccgtcggaagacgcccgctgtctgccgcagttttcatcaacaatcgcgctgcgcgaacgatcaggttatcttcatgttccacgccttcaacgggcgttaacagacgaatatccccatcgtcacgaagctcaatgctgatggtgtcgccgtaatcaagaaactgaaacagcgtttgcagcgtgtggtaaccatccgcacgctgaccggtaatgtataaaaacagattaagttttgccggagagggccactgtgtccgcattatttcactatccagttatccatttttaacttgatgcgttgaccaccgtcggtgagttccatattggctggcatcgcaggttgcgttttggtgtcataaccaccataaacaaccttccagtttttgccattctggctgtaggtaatttcgctcaggcggtactggtcgtccagtttgtagtcggttgcatcacccggtaaacctaaaatccactggcgcaagctgttgagcggaattggcattccggtcaatttgccaatcatctcttcggcgtcatcggcggtataacgctgacctttattgtcgactaactgcacgttacccggttgagcattcagctccagttccgtgctgcccaatgggttagtgagcagcagacggtagcgatcctggccggtttgctgccagaaaaagcgggcgtacactttttgttggtcagaaatataagcgaacgcgccgcgagtctgatactgattaagattgcgcacgtcttgctgatgctgacgccattgtggcgaatccgggcttttgccaggacctttgggcgtggtaacggaacaggcagtgagcacaagagcagccagcggtagcaggcggataagacgaaaatcgggcaggggcatagtgatgacaagtccttgagatacgttgcagttataacccttaatgctagcgttaccgtccgctatcgtctatgttcaagttgtcttaattgccagaatctaacggctttcggcaattactccaaaagggggcgctctcttttattgatcttacgcatcctgtatgatgcaagcagactaaccctatcaacgttggtattatttcccgcagacatgacccttttagcactcggtatcaaccataaaacggcacctgtatcgctgcgagaacgtgtatcgttttcgccggataagctcgatcaggcgcttgacagcctgcttgcgcagccgatggtgcagggcggcgtggtgctgtcgacgtgcaaccgcacggaactttatcttagcgttgaagagcaggacaacctgcaagaggcgttaatccgctggctttgcgattatcacaatcttaatgaagaagatctgcgtaaaagcctctactggcatcaggataacgacgcggttagccatttaatgcgtgttgccagcggcctggattcactggttctgggggagccgcagatcctcggtcaggttaaaaaagcgtttgccgattcgcaaaaaggtcatatgaaggccagcgaactggaacgcatgttccagaaatctttctctgtcgcgaaacgcgttcgcactgaaacagatatcggtgccagcgctgtgtctgtcgcttttgcggcttgtacgctggcgcggcagatctttgaatcgctctctacggtcacagtgttgctggtaggcgcgggcgaaactatcgagctggtggcgcgtcatctgcgcgaacacaaagtacagaagatgattatcgccaaccgcactcgcgaacgtgcccaaattctggcagatgaagtcggcgcggaagtgattgccctgagtgatatcgacgaacgtctgcgcgaagccgatatcatcatcagttccaccgccagcccgttaccgattatcgggaaaggcatggtggagcgcgcattaaaaagccgtcgcaaccaaccaatgctgttggtggatattgccgttccgcgcgatgttgagccggaagttggcaaactggcgaatgcttatctttatagcgttgatgatctgcaaagcatcatttcgcacaacctggcgcagcgtaaagccgcagcggttgaggcggaaactattgtcgctcaggaaaccagcgaatttatggcgtggctgcgagcacaaagcgccagcgaaaccattcgcgagtatcgcagccaggcagagcaagttcgcgatgagttaaccgccaaagcgttagcggcccttgagcagggcggcgacgcgcaagccattatgcaggatctggcatggaaactgactaaccgcttgatccatgcgccaacgaaatcacttcaacaggccgcccgtgacggggataacgaacgcctgaatattctgcgcgacagcctcgggctggagtagcagtacatcattttctttttttacagggtgcatttacgcctatgaagccttctatcgttgccaaactggaagccctgcatgaacgccatgaagaagttcaggcgttgctgggtgacgcgcaaactatcgccgaccaggaacgttttcgcgcattatcacgcgaatatgcgcagttaagtgatgtttcgcgctgttttaccgactggcaacaggttcaggaagatatcgaaaccgcacagatgatgctcgatgatcctgaaatgcgtgagatggcgcaggatgaactgcgcgaagctaaagaaaaaagcgagcaactggaacagcaattacaggttctgttactgccaaaagatcctgatgacgaacgtaacgccttcctcgaagtccgagccggaaccggcggcgacgaagcggcgctgttcgcgggcgatctgttccgtatgtacagccgttatgccgaagcccgccgctggcgggtagaaatcatgagcgccagcgagggtgaacatggtggttataaagagatcatcgccaaaattagcggtgatggtgtgtatggtcgtctgaaatttgaatccggcggtcatcgcgtgcaacgtgttcctgctacggaatcgcagggtcgtattcatacttctgcttgtaccgttgcggtaatgccagaactgcctgacgcagaactgccggacatcaacccagcagatttacgcattgatactttccgctcgtcaggggcgggtggtcagcacgttaacaccaccgattcggcaattcgtattactcacttgccgaccgggattgttgttgaatgtcaggacgaacgttcacaacataaaaacaaagctaaagcactttctgttctcggtgctcgcatccacgctgctgaaatggcaaaacgccaacaggccgaagcgtctacccgtcgtaacctgctggggagtggcgatcgcagcgaccgtaaccgtacttacaacttcccgcaggggcgcgttaccgatcaccgcatcaacctgacgctctaccgcctggatgaagtgatggaaggtaagctggatatgctgattgaaccgattatccaggaacatcaggccgaccaactggcggcgttgtccgagcaggaataatggaatatcaacactggttacgtgaagcaataagccaacttcaggcgagcgaaagcccgcggcgtgatgctgaaatcctgctggagcatgttaccggcagagggcgtacttttattctcgcctttggtgaaacgcagctgactgacgaacaatgtcagcaacttgatgcgctactgacacgtcgtcgcgatggtgaacccattgctcatttaaccggggtgcgagaattctggtcgttgccgttatttgtttcgccagcgaccttaattccgcgcccggatacggagtgtctggtggagcaggcactggcgcggttgcctgaacaaccttgccgtattctcgatctcgggacgggtaccggggcgattgcgcttgcgctggctagcgagcgcccggactgcgaaattatcgctgtagatcgtatgcctgatgctgtctccctggcacaacgtaatgcccagcatctggcgatcaaaaatatccacattctgcaaagcgactggtttagcgcgctagccgggcagcagtttgcgatgattgtcagcaatccgccgtatattgacgagcaggaccctcatcttcaacaaggcgatgtccgctttgagccgctcactgcgctggttgcggcagacagtggaatggcagacatcgtgcatatcatcgaacagtcgcgtaacgcgctggtatccggcggctttctgcttctggaacatggctggcagcagggcgaagcggtgcgacaagcatttatcctcgcggggtatcatgacgtcgaaacctgccgtgactatggtgataacgagcgcgtaacgctcggccgctattatcaatgacaagtttttctacactgcttagtgttcatcttattagtatcgcgctttctgttgggctattaaccttacgtttctggctacgttatcagaagcatccacaggcatttgctcgctggacgcgcattgtgccgccggttgtcgatacgctgttactgttaagcggcattgcgttgatggctaaagcgcacatcctgccattttccgggcaggcacagtggctgactgaaaagctgtttggagttatcatttatatcgttttgggttttattgcactcgattatcgtcgtatgcacagtcagcaggcgcgcattattgccttcccgctggcgttggtggtgctgtacatcatcattaaactcgccaccacaaaagtaccgttactggggtaagtcatgagatcgttagctgatttcgaatttaataaagcgccattgtgcgaaggcatgatcctggcttgcgaagcaatccgccgcgattttccctcgcaagatgtttacgacgaactggagcgtctcgttagtctggcgaaggaagaaatcagccagcttctgcctttagaagagcagttggaaaaactgatcgcgctgttttacggcgactggggatttaaagcctcacgcggtgtttatcgtctttccgatgcattatggctggaccaggtgttaaagaatcgacagggcagtgcggtatcattaggtgcggttttattatgggtcgcgaatcgtctcgatttgccgctgctgccggtgattttccctacgcagctgatattgcgcattgaatgtccggatggcgaaatttggctgattaatccttttaacggtgaatcgttaagcgaacatatgctggacgtatggttaaagggaaatatcagcccgtcggcggaactgttttatgaagaccttgatgaagctgataacattgaggtaatccgcaaattgctggatacactcaaagcctcgttgatggaagaaaatcagatggagctggcgttacgcaccagcgaagctttattacaattcaaccctgaagatccctatgaaattcgcgatcgcgggttgatttatgcgcaactggattgcgaacacgttgcgttgaacgatttaagttatttcgttgaacagtgtccggaagacccgatcagcgaaatgatccgtgcgcaaataaataacatcgcgcataaacatattgtgctgcattaattaatcgacattttactcaagattaaggcgatcctatgaaacaaaaagtggttagcattggcgacatcaacgtagcaaatgacctgccgttcgtactgtttggcggtatgaacgtgttggaatctcgcgatctggcgatgcgcatttgcgagcactacgtaactgtgacccagaaactgggtatcccttacgtgttcaaagcctcttttgacaaagccaaccgctcctccatccactcttatcgtggaccgggcctggaagaagggatgaaaatcttccaggagttgaagcagacttttggcgtgaaaattatcaccgacgttcacgaaccaagtcaggcacagcccgttgctgatgtcgtggatgtgattcagttgccggcgtttcttgctcgccagactgacctggttgaagccatggcgaaaaccggtgcggtaattaacgtcaagaaaccacagtttgtcagcccgggacagatgggtaatatcgttgataaattcaaagaaggcggcaacgaaaaagtgattctttgcgatcgcggtgctaacttcggctatgacaacctggttgtcgatatgctgggcttcagcattatgaagaaagtgtctggtaactcgccggtgattttcgacgtgacccacgcactgcaatgccgcgatccgtttggcgcagcttccggtggtcgtcgtgctcaggtggctgagctggcacgagccggtatggcggtaggtctggcggggctgtttattgaagcgcatccggatccggaacatgcgaaatgtgatggtccatccgcgctgccgctggctaaactggaaccgttcctcaagcagatgaaagcgattgatgatctggtgaaaggtttcgaagaactggataccagcaagtaatcttttttgcttgaaaaataaagtattagcgttctgcgttaagacttttttcatgggtgccggatacaaaaaaggccgcaggctgttacccctgcggccggtttcgggcgcatattgccatcacggcagcctgacgcccgttttcaccttacttccggttacgccaccagctgacaatcgctgcggtaataattcccgccaggatcggtgctgccaggtcgtgccagaaaatcatggcaaactgcgcgagcgtcatatagccgccttgttgtaatgacaacattttgcggctattcttgaattgttctggttcaagattagcccccgttctgttgtcaggttgtacctctcaacgtgcgggggttttctctttccagcaaccaatgccaccagggataaagcccccgcaacattgcgcctcaccggataacgccggcttggtgtggatactacgactcaattcatcttcacttcatccctgaaatgtttgcaatgaagagtgcattccggtttttcaacagctgttacagtcatttcatgagtgctctggatgaggcttccagctcgggttgccaatatttacttgtggaagtgataaagacaaaaatggccgcaggctgttacccctgcggccggtttcgggcgcatattgccatcacggcagcctgacgcccgttttcaccttacttccggttacgccaccagccgacaatcgctgcggtaataattcccgccaggatcggtgccgccaggtcgtgccagaaagtcatggcaaactgcgcgagcgtcatatagccgccttgttgtaatgacaacattttgcggctattcttgaagtgtctggtttcaagattagcccccgttctgttgtcaggttttacctctcaacgtgcgggggttttctctttccagcaaccaatgccaccagggataaagcccccgcaacattgcgcctcaccggataattccggcttggtgtggatactacgtctcaattcatcttcacttcatccctgaaatgtttgcaataaagagtacattccggcttttcaacagctgttgcagtcgtttcatgagtgctctggatgatgcttccagctcgggttgccaatatttacttgtggaagagataaagacaaaaatggccgcaggctgttacccctgcggccggtttcgggcgcatattgccatcacggcagcctgacgcccgttttcaccttacttccggttacgccaccagctgacaatcgctgcggtaataattcccgccaggatcggtgctgccaggtcgtgccagaaaatcatggcaaactgcgcgagcgtcatatagccgccttgttgtaatgacaacattttgcggctattcttgaagtgtctggtttcaagattagcccccgttttgttgtcaggttttacctctcaacgtgcgggggttttctctttccagcaaccaatgccaccagggataaagccccgcaacattgcgcctcaccggataacgccggcttggtgtggatactacgtcgcaattcatcttcacttcatccctgaaatgtttgcaatgaagagtacattccggcttttcaacagctgttgcagtggtttcgtgcagggtgtggtacaggctcgcaattctgattaacgacctgtccaggtagtatgaagaaatacaataagcaggaatttatattatctcccccgattaccgtcatcggaggagatataactgtcaggcaaatatcgtcatcaaataggcggcaaacagtgccagatgcgctgcgccattgagcacgttagtacgtccggtggagaaggagatatggcacagcactaaagaggccaccatcaccaccatttctggcgcaccaagtgcaaactgcaattcgttacccgtcataaaggcaattagcgtgacgacaggtacggtaagcgaaatggttgctaacactgaaccaaagaacagattcatcgcgcgctgaacctggttgttcaacactgcttttaatgcacctaaaccttccggcgacagaatcaacagtgccaccaggaagccagtaaaggcgacaggggcattcatgctgtcgagcaatgtctccagcgagctggcgttcattttggtcaccgcaataacggcaatcagatggataatcaaccagatagcatgccacaggctgctatgggcagacggtttaccgtgatgcgggtcgtcatcatcactgtcatcttcgtgctcgtagacaaacaaactttgatgcgttttggtctggatcagcaaaaatacgccatacattgccgcagaaattaatgctaccagtaacgcctgaccggttgaaaaattcgccgcaggcagagccattggaaataccagtacgattatcgccagggggaacagcgcaattaaatactgcttgataccaaacagattcatatattgggtggcaaacttacgaccgcccaacaataatgaaaagccaaccagcccaccggtaacaatcataatgattgaatagagcgtatcacgcattagcgttggcgcggcgtcgccggttgccattaaagctgaaatcaaactgacttcaagaataaccactgaaaggctaagaataagcgaaccgtaaggttctcccaggcgatgggctaatacgtccgcatgacggacaacactaaaggcgctacttaaaataccaataagcgcaagaagattgatggcaatgaccactggtagtgtctggctgcttccccacaggaacagcactaccagcgccagaaccgggaaaataagcgaagtctccttgtggcgggtttttaccgcctcttgagcatttgacattatggttatccctttgcagatgaatttatcgaaaatgtaaaaaataggtaggaaaaataacagaaagtgtctggatatcggtaacattttacgaatttttaccccgctgtcgattttttactcattggggcataaaaataagtattacgtttagacaatgtttgttttagcgtctcttaagaagagtctgacctgaaaattcttatgttttggcaagagtagatattgttgaccacacttaatgttcaactttgtaaaaggagtcaacgatgccgtataaaacgaaaagcgatctgccggaaagcgtaaagcacgttctaccgtctcatgcccaggatatctataaagaagcgttcaacagcgcatgggatcaatataaagataaagaagatcggcgtgatgacgccagtcgcgaagaaaccgcgcataaagtggcctgggctgctgtgaagcatgaatatgccaaaggggatgatgataaatggcataaaaaatcgtaaaaccggtcgcttagttaaagctattcgtgcggtgttgccttgcaagtggtccgtggattgcatattgtcccgttagtggtttcaaaatgagcagtaaaaatgtccggaagacaccaaaaagttgtcgcagggaagtatgcagtggcggaagtgtaaggtgataacgcgtgatttcttgatgaatgccgattgtaaaacggcatttggtgccattgaagaatcactcttatggtcagcagaacaacgggcggcttcgctggcggcgacgctggcttgtcgacctgatgagggaccggtgtggatcttcggctatggatcgttgatgtggaatccggcactggagtttaccgaatcgtgcaccggtacactggttggatggcatcgcgcattttgcctgcgcctgaccgccgggcgcgggactgcgcaccagccgggacggatgcttgcactgaaagagggcggacgcaccacaggcgtcgcctatcgactgccagaagagacgctggagcaggaactaaccctgttgtggaagcgagagatgattaccggctgttatctgccaacctggtgtcagcttgatcttgatgatggacgcacagtaaacgccattgtgtttattatggacccgcgacatccagaatatgaatctgatactcgcgctcaggtcatcgcgccgttgattgcggcggcgagcggtccgctgggaaccaacgcacaatacctgttttcactggaacaggagcttatcaaactgggaatgcaggacgatgggctgaatgatttgctggtatcggtaaaaaaactgctggcggagaattttccggatggtgtgttacgtccgggattcgcctgagtaaacttcccgcatagtggggcgtcagacgccccctcaaacattaaaatgtgagcactttatcggctgacagcgtccattgcgccagttccacaagagtaccgatttccaccccatcaatcagaggaagtgtactaatcccgcgcccgtcggtacaggttttgcacaatttcaccggtacattctgagcggtaaggatctccagcatttgctgaatgttgtagccttcccctggtttttgcccgcgcaacccggctgtgaccgcatcagacatgaggaacagacgcagatccagattgctctcctgctctcgtaacgcaatggccagccgcaagctgttaaacaaggattcgctcccgtaaggtgcgccattggcaacgatcacgattttttgcattatttactcctgtattcagggaattagacactcatcttctatcttactgcttctgcagcgtctgaccaatcggtcacatttttaaggattttcctgaaagcgcgagaaaatacgacaaaagttgccagtaatcgttattctttaaggctatggtttttcattattaccggaagttaccgacgttttgagccgtttcgttcctcgcattatcccgttttatttactcttgcttgtagcaggcggtacagctaacgcacaatctaccttcgagcaaaaagcggcaaatccctttgataataacaatgatggtctgccggatttaggcatggctcccgaaaatcatgatggggaaaaacactttgctgaaattgtgaaagatttcggcgaaaccagtatgaatgataacgggctggatactggcgagcaggcaaaagctttcgcattgggaaaagtccgcgacgcgcttagtcaacaggttaatcagcacgtagagtcctggctatcaccgtggggaaatgccagtgttgacgtcaaagtggataacgaaggacatttcaccggcagtcgtggaagctggtttgtgccgttacaagataatgatcgttatctcacctggagccagcttggtcttactcagcaggataatgggttggtgagcaatgtgggcgttgggcaacgctgggcgcgcggcaactggctggtgggttataacactttttatgacaacttgctggacgaaaatcttcagcgagcgggctttggtgccgaagcgtggggcgaatatttgcgattatcggcaaacttttatcagccgtttgctgcatggcatgaacagacagccacgcaggaacaacggatggcgcgcgggtacgacctgacagctcggatgcgcatgccgttctatcaacacctcaataccagtgtcagcctagaacagtattttggtgatcgtgttgatttgtttaactctggtacgggttatcacaatcccgtcgcgttgagtctgggattaaattacacccctgtgccattagtcactgtgacggcccagcataaacagggtgaaagtggcgaaaatcaaaataacctcgggctgaatcttaattaccgctttggtgtaccgctcaaaaaacaactttctgcgggcgaggttgccgaaagtcagtcgttacgtggtagtcgctatgacaatccgcagcgaaataatctaccgactcttgagtaccgacagcgaaaaacgttaacggtgtttctggcgacaccgccgtgggatctaaaacctggcgaaacagtgccgctgaaattacaaatccgcagtcgttacggtattcggcaactgatttggcagggcgatacgcagatattaagtttgacgccgggcgcacaagccaacagcgcggagggctggacgctgatcatgcctgactggcagaacggggaaggggcaagcaatcactggcgattgtctgtggtggtggaagataaccaggggcagcgtgtctcctccaatgagatcacgctaacgcttgtcgaaccgttcgatgcattgtcaaacgacgaactgcgctgggaaccgtaatcagaaaatgcgctcctgatgcacccataccgctgcttccacgcgagacttgagcttcattttcttcagcatgtgcttgacgtgcacttttactgtgctttcggtgatatccaggcggcgggcaatcatcttgttcggcaaaccctgggcaatcagcttgagaatatcgcgctcgcgtggggttaactggttaacatcgcgctcagtagtggcacggttagcgcgcaagctggcggccagaacaggcgttaatgcttcgcttaataccatttcgccagcagctgcctgatgcaatgctttcagcagatcttccggttccatatcttttaacagatagccatccgcgccgcgtttcagtgcggtgaccacatcttcttcatggttagagacgctgaataccacaatgcgccctgagagggacttttcgcgcagtttatccagcgtttccagaccgttcatgccgggcatattgagatctaacaggatcagatcgggatcaagagactccgccagttcaataccctgttcgccattactcgcttcgccaaccacggtgatatctggtgccatactgataagctgttttacgccagttcgcagcatcgggtgatcgtcaatcagcaggatagtagccggttcctgattactcatgggtatctccttggacgtctgtgaaagttttttcgggaataaaggtgaccaccacttcggtgccacctgattcacgacggcggacgcggcaatcgcctcgtaaactttgcgcacgatcgcgcattattatcatgccgtagtgattgctgcggatggcattttcaggcacgccgcagccgttatcctggacggtcagtttgacctgattatcgttttgcgccaccgtcaccacgacttcactcgcttgcgaatgtttgagggcgttacttaatgcctcacgggcaatttgcaacaagtggattgcctgatgcgaaggcaccaggcgaggcggcaattgataatccagcttcaccgggaagccaaatttggcgctgtactcttcgcaactcgcctccagcgccggacgtaatccaggctcggtgagctgcaagcggaatgtggtgagcaattcacgcaactgcgcccaggatgcattcagttcgttacggatctgacttaacagttcgcggctgctttctggcagcgcatcgccctgcatctgtaaacaactcacctgcatcttcatgcaagagagagattgggcaatagaatcatgcagttcgcgcgcaatggtggcacgctcttccatcacgatcaactgttgctgacgttcctgatggcgatccagcgccagcgtggcggtgagttgttcaaccagggtatccaccagttgttgttgatcatggctaagatgacgcccctgcggcagggtcgccagcaaaataccgtactgcgtatgagagtcagccagccgccacttcagggtcgtgccgcgatcaccaacgggtaatacgccgcgcgggcagagctggcagcctttatcatcacaagtcatatctggctggcaggtaaactcctgatgattctcttcatcatcagtgtcatacacccgcaattcgatatcacgtagcagggttaaattctgtaagccgttgagtacaggtgacaggcgttcacacagcggggcgcgggaatgcaaacggcggttagcctgccataaaaaagagaggatctgatttttatgctccagcccggcggttttctcctgaacccgctgctcaagtacggcataactttcggccagttctgcagacatattgttcaacgcagttccaagcatcgccatttcgttgcgcccgctgatgtttgcgcgttgggtaaaatcgcgatgactgacggcactcgccattgccagcagttgccgccacggttgtagcagtcgcgcccgcaaccagataatagtgaacaccagtaaaagtgccataaataccgccattacccgatggaccagtaccactgtctcgatgcgcatttccgtggtgcggtcaaaaccagataccagttgatcaagcccggcaacaaactggctgacatccgctgacaccgtttctcggttttgtgcacgcatcagcgcagggatcagttcattacgccagtaatcttgtaaaccctgtaattgcgccagttgtccgtctcgttctgctgctcgagtcaactcggcgctaaatgccgtttgttccatctctttaattaagggcttgtctttctcgcttaatggcactgccgccaacagacggtaactttgcatgcgcagcgatcccgctttgttgatcgcatgggcgctgccctgaacgccttgcaccagccagccagaaaccgccatccctgccagtccaatagcagtagaaagcaacacaataagcgcaacctgattaaccagggtgagcggagagagacaacgtttaagcatgtaaacctcttccttcaggctttaaatgagcaataaccttaatgaatgtgacgatacattctggaatggcagtattctcggctattggctgaagtatacccatacccggaaagagttactccttatttgccgtgtggttagtcgctttacatcggtaagggtagggattttacagcaccgtgaaaaatctcataatttttatgaagtcactgtactcactatgggtaatgataaatatcaatgatagataaagttatcttatcgtttgatttacatcaaattgcctttagctacagacactaaggtggcagacatcgaaacgagtatcagaggtgtctatgagtcactcatccgcccccgaaagggctactggagctgtcattacagattggcgaccggaagatcctgcgttctggcaacaacgcggtcaacgtattgccagccgcaacctgtggatttccgttccctgtctgctgctggcgttttgcgtatggatgttgttcagcgctgttgcggtgaacctaccgaaagtcggctttaattttacgaccgatcagctatttatgttgactgcgctgccttcggtttctggcgcgttattacgtgttccatactcctttatggttcctatcttcggtggtcgtcgctggacggcgttcagcaccggtattctgattattccttgcgtctggctgggttttgccgtgcaggatacctccacgccttatagcgtcttcatcatcatctctctgctatgcggctttgctggcgcgaacttcgcatccagtatggcaaacatcagcttcttctttccgaaacagaagcagggtggcgcgctgggtctgaatggtggtctgggaaacatgggcgtcagcgtcatgcagttggttgctccgctggtggtatcactgtcgattttcgcagtatttggtagccagggcgtcaaacagccggatgggactgagctgtatctggcgaatgcgtcctggatatgggtgccgttccttgccatcttcaccattgcggcgtggtttggcatgaacgatcttgctacctcgaaagcctccatcaaggagcagttgccggtactcaaacggggtcatctgtggattatgagcctgctgtatctggcaaccttcggctccttcatcggcttctccgcgggctttgcaatgctgtcaaaaacgcagttcccggatgttcagattctgcaatacgctttcttcgggccgtttattggtgcgctggcgcgttctgcaggtggtgcattatctgaccgtctgggcggaactcgtgtcacgctggtgaactttattctgatggcgattttcagcggcctgctgttcctgaccttaccgactgacgggcagggcggaagcttcatggcgttcttcgcggtcttcctggcgctgttcctgacagctgggctgggtagtggttccactttccagatgatttcagtgatcttccgtaaactgacaatggatcgcgtgaaagcagaagggggttctgacgaacgtgcgatgcgtgaagcggcaaccgacacggcggcggcgctgggtttcatctctgcgattggcgcgattggtggcttctttatcccgaaagcgtttggtagctcgctggcattaacgggttcgccagtcggcgcaatgaaggtatttttgattttctatatcgcctgcgtagtgattacctgggcggtatatggtcggcattctaaaaaataaaccgttactcgtcatacttcgggttacatgtgctgcggctgcgttcattcaccccagtcacttactttagtaagctcctgggattcattcacttgccgccttcctgtaaaccgaattatatagagtaaaatatttgattatcctttgcgcggcatgatgtcgcgctttttttatgcgtcatttagttacaacatactaatgttatatggtttatttcgccggatttcattaagagccattaatatgttacccatggggaatactccttaatacccatctgcataaaaatcttaatagtttaaataactacaggtataaaacgtcttaatttacagtctgttatgtggtggctgttaattatcctaaaggggtatcttaggaatttactttatttttcatccccatcactcttgatcgttatcaattcccacgctgtttcagagcgttaccttgcccttaaacattagcaatgtcgatttatcagagggccgacaggctcccacaggagaaaaccgatgagtaaattcctggaccggtttcgctacttcaaacagaagggtgaaacctttgccgatgggcatggccagcttctcaataccaaccgtgactgggaggatggatatcgccagcgttggcagcatgacaaaatcgtccgctctacccacggggtaaactgcaccggctcctgcagctggaaaatctacgtcaaaaacggtctggtcacctgggaaacccagcagactgactatccgcgtacccgtccggatctgccaaaccatgaacctcgcggctgcccgcgcggtgccagctactcctggtatctttacagtgccaaccgcctgaaatacccgatgatgcgcaaacgcctgatgaaaatgtggcgtgaagcgaaggcgctgcatagcgatccggttgaggcatgggcttctatcattgaagacgccgataaagcgaaaagctttaagcaggcgcgtggacgcggtggatttgttcgttcttcctggcaggaggtgaacgaactgatcgccgcatctaacgtttacaccatcaaaaactacggcccggaccgtgttgctggtttctcgccaattccggcaatgtcgatggtttcttacgcatcgggtgcacgctatctctcgctgattggcggtacttgcttaagcttctacgactggtactgcgacttgcctcctgcgtctccgcaaacctggggcgagcaaactgacgtaccggaatctgctgactggtacaactccagctacatcatcgcctgggggtcaaacgtgccgcagacgcgtaccccggatgctcacttctttactgaagtgcgttacaaagggaccaaaactgttgccgtcacaccagactacgctgaaatcgccaaactgtgcgatctgtggctggcaccgaaacagggcaccgatgcggcaatggcgctggcgatgggccacgtaatgctgcgtgaattccacctcgacaacccaagccagtatttcaccgactatgtgcgtcgctacaccgacatgccgatgctggtgatgctggaagaacgcgacggttactacgctgcaggtcgtatgctgcgcgctgctgatctggttgatgcgctgggccaggaaaacaatccggaatggaaaactgtcgcctttaataccaatggcgaaatggttgcgccgaacggttctattggcttccgctggggcgagaagggcaaatggaatcttgagcagcgcgacggcaaaactggcgaagaaaccgagctgcaactgagcctgctgggtagccaggatgagatcgctgaggtaggcttcccgtactttggtggcgacggcacggaacacttcaacaaagtggaactggaaaacgtgctgctgcacaaactgccggtgaaacgcctgcaactggctgatggcagcaccgccctggtgaccaccgtttatgatctgacgctggcaaactacggtctggaacgtggcctgaacgacgttaactgtgcaaccagctatgacgatgtgaaagcttataccccggcctgggccgagcagattaccggcgtttctcgcagccagattattcgcatcgcccgtgaatttgccgataacgctgataaaacgcacggtcgttcgatgattatcgtcggtgcggggctgaaccactggtatcacctcgatatgaactatcgtggtctgatcaacatgctgattttctgcggctgtgtcggtcagagcgggggcggctgggcgcactatgtaggtcaggaaaaactgcgtccgcaaaccggctggcagccgctggcgtttgcccttgactggcagcgtccggcgcgtcacatgaacagcacttcttatttctataaccactccagccagtggcgttatgaaaccgtcacggcggaagagttgctgtcaccgatggcggacaaatcccgctataccggacacttgatcgactttaacgtccgtgcggaacgcatgggctggctgccgtctgcaccgcagttaggcactaacccgctgactatcgctggcgaagcggaaaaagccgggatgaatccggtggactatacggtgaaatccctgaaagagggttccatccgttttgcggcagaacaaccagaaaacggtaaaaaccacccgcgcaacctgttcatctggcgttctaacctgctcggttcttccggtaaaggtcatgagtttatgctcaagtacctgctggggacggagcacggtatccagggtaaagatctggggcaacagggcggcgtgaagccggaagaagtggactggcaggacaatggtctggaaggcaagctggatctggtggttacgctggacttccgtctgtcgagcacctgtctctattccgacatcattttgccgacggcgacctggtacgaaaaagacgacatgaatacttcggatatgcatccgtttattcacccgctgtctgcggcggtcgatccggcctgggaagcgaaaagcgactgggaaatctacaaagccatcgcgaagaaattctccgaagtgtgcgtcggccatctgggtaaagaaaccgacatcgtcacgctgcctatccagcatgactctgccgctgaactggcgcagccgctggatgtgaaagactggaaaaaaggcgagtgcgacctgatcccaggtaaaaccgcgccacacattatggtcgtagagcgcgattatccggcgacttacgaacgctttacctctatcggcccgctgatggagaaaatcggtaatggcggtaaagggattgcctggaacacccagagcgagatggatctgctgcgtaagctcaactacaccaaagcggaaggtccggcgaaaggccagccgatgctgaacaccgcaattgatgcggcagagatgatcctgacactggcaccggaaaccaacggtcaggtagccgtgaaagcctgggctgccctgagcgaatttaccggtcgtgaccatacgcatctggcgctgaataaagaagacgagaagatccgcttccgcgatattcaggcacagccgcgcaaaattatctccagcccgacctggtctggtctggaagatgaacacgtttcttacaacgccggttacaccaacgttcacgagctgatcccatggcgtacgctctctggtcgtcagcaactgtatcaggatcaccagtggatgcgtgatttcggtgaaagcctgctggtttatcgtccgccgatcgacacccgttcggtgaaagaagtgataggccagaaatccaacggcaaccaggaaaaagcgctcaacttcctgacgccgcaccagaagtggggtatccactccacctacagcgacaacctgctgatgctgactttaggtcgcggtggtccggtggtctggttgagtgaagccgatgccaaagatctgggtatcgccgataacgactggattgaagtcttcaacagcaacggtgctctgactgcccgtgcggttgtcagccagcgtgttccggcagggatgaccatgatgtaccacgcgcaggaacgtatcgttaacctgcctggttcggaaattacccaacagcgtggtggtatccataactcggtcacccgtatcacgccgaaaccgacgcatatgatcggcggctatgcccatctggcatacggctttaactactatggcaccgtaggttctaaccgcgatgagtttgttgtagtgcgtaagatgaagaacattgactggttagatggcgaaggcaatgaccaggtacaggagagcgtaaaatgaaaattcgttcacaagtcggcatggtgctgaatctcgataagtgcatcggctgccacacctgttcagttacctgtaaaaacgtctggaccagccgtgaaggcgtggaatatgcgtggttcaacaacgtggaaaccaagccgggccagggcttcccgactgactgggaaaaccaggaaaaatacaaaggcggctggatccgtaaaatcaacggcaaactgcagccgcgcatgggtaaccgtgccatgctgctgggtaaaatcttcgctaacccgcatctgccggggatcgacgattattacgagccgttcgattttgactatcagaacctgcataccgcgccggaaggcagcaaatcgcagccgattgcccgtccgcgttcgctgattaccggggaacggatggcgaaaatcgaaaaagggccgaactgggaagatgacctgggcggtgagtttgacaaactggcgaaagacaagaacttcgacaacatccagaaggcgatgtatagccagttcgaaaacaccttcatgatgtatttgccgcgcctgtgcgaacactgcctgaacccggcatgtgtggcgacctgcccgagcggtgcgatttacaagcgtgaagaagatggcatcgtcctgatcgaccaggataaatgccgtggctggcgtatgtgcatcactggatgcccgtacaaaaaaatctacttcaactggaagagcggtaagtctgagaagtgcatcttctgctatccgcgtattgaagcgggtcagccgaccgtgtgctcagaaacctgtgtcggtcgtatccgttatcttggcgtgctgttgtacgatgccgacgctattgaacgtgcagccagcaccgagaacgagaaagatctttaccagcgtcagctggacgtgttcctcgatccgaacgatccgaaagtcatcgagcaggcgattaaagacggtattccgctgagcgttattgaagccgcacagcagtcgccggtttataaaatggcaatggaatggaaactggcgctgccgctgcatccggaatatcgcacactgccgatggtctggtacgtgccgcctctgtctccgattcagtctgcagcagacgcgggtgagctgggtagcaacggcattctgccagacgtcgaaagcctgcgtattccggtacagtatctggcgaatctgctgaccgccggtgataccaaaccggtactgcgcgcactgaaacgtatgctggcgatgcgtcattacaaacgtgctgaaaccgttgacggtaaagttgatacccgtgcgctggaagaggtcggtctgaccgaagcccaggcacaggagatgtaccgttatctggcgattgctaactacgaagatcgctttgtggtgccgagtagtcatcgtgaactggcacgggaagccttcccggagaaaaatggctgcggctttacctttggtgatggctgccacggttcagataccaaattcaatctgttcaacagccgtcgtatcgatgccatcgatgtgaccagcaaaacggagccgcatccatgatcgaactcgtgattgtatcgcgtctccttgaatatccggatgctgccttatggcagcatcaacaagagatgtttgaggcgattgccgcgtcgaaaaatctgccaaaagaggatgcccatgcgctgggcattttcctgcgcgatttaacgacgatggatccgctcgatgcccaggcgcagtacagcgaactgttcgaccgtggccgcgccacgtcactgttgctgtttgaacatgtgcacggcgaatcccgcgaccgcggccaggcgatggtggacctgctggcgcagtacgagcagcacggcttgcagttaaacagccgcgaattgccggaccatctgccgctgtatctggagtacctggcgcagctgccgcaaagcgaagccgtggaaggtttgaaagatatcgcgccgattctggcattgctgagcgcgcgtctgcaacagcgtgaaagccgttatgccgtgctgtttgatctgctgctgaaactggcgaataccgctatcgacagcgacaaagtggcggaaaaaattgccgacgaagcgcgcgatgatacgccgcaggcgctggatgctgtctgggaagaagagcaggttaaattctttgctgacaaaggctgcggtgattcagcaatcactgcgcatcagcgtcgctttgccggtgccgtcgcgccgcaatatctgaatatcaccaccggaggacagcactaatgcaattcctgaatatgttcttctttgatatctacccgtacatagccggggcggtcttcctgattggtagctggctgcgttatgactacgggcagtacacctggcgcgcggcgtccagccagatgctggatcgcaaagggatgaacctggcgtcgaacctgttccatatcgggattctggggatttttgtcggtcacttcttcggtatgctgacgccgcactggatgtatgaagcctggctgccgattgaagtgaaacagaaaatggcaatgtttgctggtggtgccagcggcgtgctgtgtctgattggcggcgtgctgttgctgaaacgtcgtctgttcagcccacgcgtgcgtgcaaccactaccggagcggatatcctgatcctgtcgctgctcgttatccagtgcgcgctgggcctgttgaccattccgttctccgctcagcatatggacggtagcgagatgatgaaactggttggctgggcgcagtcggtggtgaccttccacggtggcgcttctcaacacctcgatggtgtggcgtttatcttccgtctgcacctggtgctggggatgacgttattcctgctgttcccgttctcgcgtctgatacacatctggagcgtaccggtggagtatctgacacgtaagtaccagctggtgcgcgctcgtcactaagcgaattttagttcacatagaccctgcttcggcggggtttttttatgggcacggtgcggggtgagttgtcggatgcgcttcgcttatccgacctacaggggaggatattgtaggcccggtaaacgtggtgccatcgggcaaaattagctcggagtaacaggttttgattatttaaggaagcgatggtggtgggggaaggattactcagcgctgcgcgcttcgcccttcgggtcgttgcctgcggcaacgctctctcgctggcgctcaagtcgaaccttggtcgaagcttctcatccttccccgcttgggcagaatatttgattgcggattcgtttgagaattccggggcttttgaaagtgatggtggtgggggaaggattactcagcgctgcgcgcttcgcccttcgggtcgttgcctgcggcaacgctctctcgctgacgctcgagccgaaccttagtcgaagcttctcatccttccccgcatgggcagaatatttgattgcggattcgcttgagagttcagggacttttgaaagtgatggtggtgggggaaggattactcagcgctgcgcgcttcgcccttcgggtcgttgcctgcggcaacgctctctcgctggcgctcgagtcgaaccttggtcgaagcttctcatccttccccgcatgggcagaatatttaattgcggattcgttgggaagttcagggacttttgaaagtgatggtggtgggggaaggattcgaaccttcgaagtcgatgacggcagatttacagtctgctccctttggccgctcgggaaccccaccaggggtaattcaaattttgaggtaatgcttgagatggtggtgggggaaggattattcgtcgcttcgctcctcacccttcgggccgttgcctgtggcaacgttctctcgctttcgctcgaatcgaaccttagtcgaaggttctcacccttccccgatgagtgcaaactttcacaatctcaccgaagttaccacatcgctgtggtgaattatggtggtgggggaaggattcgaaccttcgaagtcgatgacggcagatttacagtctgctccctttggccgctcgggaaccccaccacggggtaatgctttttactggcctgctcccttatcgggaagcggggcgcatcatatcaaatgacgcgccgctgtaaagtgttacgttgagaaaaatgaactggttgcgtaattttcatccgtaacggattaaaggtaaccagttatttttgctggcgattaaagaataatcgttcgattaccgtaaacaaagacgcgctgtgccagtactttgtatagtgcacgacttaagacgtttttctcgacgtcacgacctgcgcgcatcatatcttcagctgtgtaggtatgatcgacatgaataacgtcctgcatgatgattgggccttcgtccagattgtcattcacatagtgagcggttgcgccaataatcttcacaccacgttcataggcctggtgataaggacgtgcgccaataaacgctggcaggaatgaatggtgaatattgatgatcttattcgggaagcgtgccacaaattccggcgttaatacccgcatatacttcgccagcaccacgtagtcaggttgataagcatcaatggcatccgccatcttttgatcgtgctcgttgcgggttaacccttcatggcttaccagctcaaacggaatatcaaaacgctcaaccagagaacgtaaagtatcgtggttaccaataactgccgcgatttcgacatccaggccgccgtaattggctttcatcaacaaatcgccaaggcaatgcgcttctttagtgaccagaatcactatccggcgacgaccggcaggattcagctcacgcacggagccttctggcaatgcgctatcgagatccgccagcagggtggaatcattaaaaatcccttccagttccgtgcgcataaaaaagcgcccggtacggtgatcaacaaattcattgttctgtacgatatttaactcgtgcttgtagcaaatattggtaatacgtgcgatcagacctttttggtccggacaaatagtacgcagaactttacgttggagtgaatgcattgctggaaaaaccttgttgagagtgtttgctaaaccgtaccgtcaaccattattggccgcagcactttttaaattttttacctgaaccacaagggcagggatcgttgcgaccaaactgcggacgtgtaccgtcaatatagtaccattgaccgttttctttcaaaaatcgcgaacgttcaattattgcacctgttttaccaccttcggtaaatcgagcaacaaaactgacaaatccgatattgtcggcgtcctgccaacaatgttcaaatacggtcaatcccaaccattcagtatgcgcaaatccggccatcaattcggcacgtaacgccgctgctccacaagagggatgccaggtctttattaaataatctgcgtcttgcatcacaaaagcgcagtaacgcgaacgcatgagatgttctggatcaggtgcaaccttttcaccagacacataagggtggcaacataggctatactcgacagcactaccacagggacaaagctgagacacaaataatctccctggaaacaataacggcgtattaaccgcctgagtagcactatgttaaccgagcagtagcgatgtggctacgattgcattccaggggaatcttgcgggaataatgagaaagataaaaatagggctggcgctgggatctggcgcggcgagaggttggtcgcatattggcgttattaatgcgctaaaaaaagtgggtattgaaattgatatcgttgcaggatgttcaattggttcgctggtgggcgctgcctatgcatgcgatcgattatctgcgctggaagattgggtgacctctttcagttattgggatgttttacgcctgatggatctctcctggcagcgcggtgggttactgcgcggcgagcgtgtcttcaatcaataccgcgaaataatgccggaaacagagatcgaaaattgttcccgtcgctttgcggctgttgccaccaatttaagtacgggacgtgaattatggtttactgaaggcgatctccatcttgctattcgcgcatcatgcagtattccaggactcatggcacctgttgcacataacggctactggctggttgatggagcagtcgttaacccaattcctatttccctcacgcgtgcattgggggctgatattgtgatagcggttgacctgcagcacgatgctcatttgatgcaacaagatttgctctcctttaatgtcagtgaagaaaatagcgagaatggtgattctctgccgtggcatgcgcgtctgaaagaaaggttaggcagcataacgacacgtcgggcggtgacagcgccaacggcaacagagattatgaccacttctatccaggtgctggagaaccgccttaaaaggaaccgcatggcaggtgatccgcccgatattctgattcaacctgtttgcccgcaaatatctacgcttgatttccatcgcgcgcacgctgccattgcggccggacagctggcagtggaaaggaaaatggacgaacttttgccgttggtacgcaccaacatttgaccagaatttttatctacacttaagttaattctgacaggcgcaggtggcaatagcatgccactattgagtaaagccagtcaggggagagaacatgacgcagccattggtcggaaaacagattctcattgttgaagatgagcaggtatttcgctcgcttctggattcatggttttcctcattgggagcgacaacggtactggcggctgatggggtggatgcccttgagttgctgggaggtttcactccagacctgatgatatgtgatatcgcgatgccacgaatgaacgggcttaaactgctggagcatatacgtaacagaggcgaccagaccccagttctggtgatatctgccactgaaaatatggcagatattgccaaagcgttacgtctgggcgttgaagatgttttgctgaaaccagttaaagatctgaatcgcttgcgcgagatggtttttgcctgtctctatcccagcatgtttaattcgcgcgttgaggaagaggaaaggctttttcgcgactgggatgcaatggttgataaccctgccgcagcggcgaaattattacaggaactacaaccgccggttcagcaggtgatttcccattgccgggttaattatcgtcaattggttgccgcggacaaacccggcctggtgcttgatattgccgcactttcggaaaacgatctggcattttattgccttgatgtcacccgagctggacataatggcgtacttgctgccttgttattacgcgcattgtttaacggattattacaggaacagcttgcacaccaaaatcaacggttgccagagttgggcgcgttattgaagcaggtaaaccatttacttcgtcaggccaatctgccggggcagtttccgctattagttggctattatcatcgcgaactgaaaaatctcattctggtttctgcgggtctgaatgcgacgttaaataccggcgaacaccaggtgcaaatcagtaatggtgttccgttaggcactttaggtaacgcttatttgaatcaattgagccagcgatgcgatgcctggcaatgccaaatatggggaaccggtggtcgactgcgcttgatgttgtctgcagaatgagcaaacgataacgcgggctaaatttgcattacctgctaatgtcggctggtggtactatcgtcgccattcgtataagtaattgtcttaattatgctaactcgcctccttttcagaacttagccccttcggggtgctgatatactgggatgcgatacagaaatatgaacacgttcaaaacacgaacagtccaggagaatttaaatggctgccattaatacgaaagtcaaaaaagccgttatccccgttgcgggattaggaaccaggatgttgccggcgacgaaagccatcccgaaagagatgctgccacttgtcgataagccattaattcaatacgtcgtgaatgaatgtattgcggctggcattactgaaattgtgctggttacacactcatctaaaaactctattgaaaaccactttgataccagttttgaactggaagcaatgctggaaaaacgtgtaaaacgtcaactgcttgatgaagtgcagtctatttgtccaccgcacgtgactattatgcaagttcgtcagggtctggcgaaaggcctgggacacgcggtattgtgtgctcacccggtagtgggtgatgaaccggtagctgttattttgcctgatgttattctggatgaatatgaatccgatttgtcacaggataacctggcagagatgatccgccgctttgatgaaacgggtcatagccagatcatggttgaaccggttgctgatgtgaccgcatatggcgttgtggattgcaaaggcgttgaattagcgccgggtgaaagcgtaccgatggttggtgtggtagaaaaaccgaaagcggatgttgcgccgtctaatctcgctattgtgggtcgttacgtacttagcgcggatatttggccgttgctggcaaaaacccctccgggagctggtgatgaaattcagctcaccgacgcaattgatatgctgatcgaaaaagaaacggtggaagcctatcatatgaaagggaagagccatgactgcggtaataaattaggttacatgcaggccttcgttgaatacggtattcgtcataacacccttggcacggaatttaaagcctggcttgaagaagagatgggcattaagaagtaacatccgtatcggtgttatccacgaaacggcgttgagcaatcgacgccgtttttttatagcttattcttattaaattgtcttaaaccggacaataaaaaatcccgccgctggcgggattttaagcaagtgcaatctacaaaagattattgcttgatcaggaaatcgtcgagggatttaccttgctcatccattgcttttttgattacagctggagtacggccttggccagtccaggttttagtttcgccgttttcgtcaacgtagctatattttgccggacgctgagcacgtttagctttggtgccagatttaacggcagcaaggctattcagcagttcgttcgggtcaataccgtcagcgatcagcatttcgcgatattgctgcagtttacgagtgcgctcttcaacttcagcagcagccgcgctttcttcttcgcgacgttcgttaacaacaacttctaatttttccagcatttcttccagcgtttcaagtgtacattctcttgcctgcgcacgaagagtacggatgttgttcagaattttaagtgcttcgctcattgtagtaatctcaaacttatattggggtggtttgttgaggtaataatagagccttaaattcagttgtgcaatagccaggaatgtaaggaattcaaaattgttctttattttgtgccgccaataaatatcttttcataaaattagccagaaaagacgcggcatatagccctatttacaccgatgatttcgcagcacgtgaggttaaaacttcctgattcatgtcacattttatggggagattatcgtaggctgacgacctttcagtcttctgtattagttgtgtttacgagaattccctattaagcgaatgatgaaaagtagaacagtcgcaataagagcatggacttagtattgcactatctcctggaggtcaacagagggctattacttgcgcaacaggttaaagattgtgaatagttaccagcagtcatttacccgcttataacaagcgaggcagttgtaatgatagctcagaaggattatgcaaggcttcgtaagggagaacgcatatacccacttctgtgcatactgttgagctgaaaaactgacgaattatgataaactccagccaactttatttcatatcattgagggcctgtggctgatggcacagctatatttctactattccgcaatgaatgcgggtaagtctacagcattgttgcaatcttcatacaattaccaggaacgcggcatgcgcactgtcgtatatacggcagaaattgatgatcgctttggtgccgggaaagtcagttcgcgtataggtttgtcatcgcctgcaaaattatttaaccaaaattcatcattatttgatgagattcgtgcggaacatgaacagcaggcaattcattgcgtactggttgatgaatgccagtttttaaccagacaacaagtatatgaattatcggaggttgtcgatcaactcgatatacccgtactttgttatggtttacgtaccgattttcgaggtgaattatttattggcagccaatacttactggcatggtccgacaaactggttgaattaaaaaccatctgtttttgtggccgtaaagcaagcatggtgctgcgtcttgatcaagcaggcagaccttataacgaaggtgagcaggtggtaattggtggtaatgaacgatacgtttctgtatgccgtaaacactataaagaggcgttacaagtcgactcattaacggctattcaggaaaggcatcgccacgattaataagaatttctttactgacagggtgagcagggcacttttatcctgtcagttcgttttacgcacttcttccgggctatatacccttctcggcagttttttaacgccgctatacgcctcacagggctcttaagcaccgacgttgacttgtgacctgtaaagtacaatatccctgtgtttaggcgttatacatcgtcgcaaatatgatgaaggctaatgctgtcggtttatggaaaagttgctttgggtaaacaaaaaatacggccccagaagggcaatgccgttcacttaagaggagcggcactatgtttcacaggataacgggtttttgatatcttaaccgacctcggccttgatggtcgggggcgttttgttatgaacaccacttccagagcaccccgaagatgctccagtcgtttcgggatggtccctggtgacgccgtgtttcccagctctatcatttctgatgcgatattcttccacgcaggcagtagccagtggcggttacaacccttctggttcagcgtcagcagcaggtcttcgctgtaaaaaagtttatcaaacaacgtaatagagttatccgggatggtggcgagcatggagtgggccagcacagtttcgctctgccggtaaggtgcggtcacggcattcagcagaatgtgacttcccaggttcattaaggccaccagacgcataaccgggtaggcgttctgccgcttagtggatgtgttggcagacccataatattcacgcagctcgggtttatcaggtgtcctgaactgtgcgccatcaatggcaaaaagttgcaggccgtgccagtcatccttcaggtaacgttccgcgcccctgtctgtgcggtctggcggaagagccattccactggggcggcccccacgcgctgacgcgcctgggtgacagcgctgcgggccagcaggttcatccccgcttcgccatccgcgctcaggttcagacggcgaacaacatcggtaattggctcattgcaccaccatccagataaccatgtcccccggtaaacgacggcggcgaacggtcgcatgagcagaaagcgtcaggcagtgttgtatccactcggtgggaaggtgttctgcaaatagttgtgcagagggcggaggcataagcggatggtcactgaaatcgagcagatcattgagaagtggcataagaaaacggctccctgttgtggaagccgttatagtgcctcagtttaaggatcggtcaactaatccttaactgatcggcattgcccagaaggggccgtttatgttgccagacagcgctactgattaagcggattttttcgcttttttctcagctttagccggagcagcttctttcttcgctgcagtttcaccttctacataatcacgaccgtagtaggtatccagcagaatctgtttcagctcggagatcagcgggtaacgcgggttagcgccggtgcactggtcatcgaatgcatcttcagacagtttatccacgttcgccaggaagtctgcttcctgaacgccagcttcacggatagatttcggaatacccagttcagctttcagcgtttccagccatgccagcagtttctcgatcttagcagcagtacggtcgcccggtgcgctcagacccaagtggtcggcaatttcagcataacgacggcgagcctgcggacggtcatactggctgaatgcagtctgcttggtcgggttgtcgttcgcattgtagcgaataacgttacaaatcagcagggcgtttgccagaccgtgcggaatatggaactgggaacccagtttgtgcgccattgagtgacatacacccaggaaggcgttcgcaaacgcgatacccgcgatagtcgctgcactgtgaacacgttcacgcgctaccggatttttagacccttcgtggtaggacgctggcagatattctttcagcagtttcagtgcctgcagagcctgaccatcagagaactcagatgccagtacagaaacataagcttccatggcgtgagttactgcgtccagaccaccgaaagcacacagggacttcggcatgtccataaccaggttggcgtcgacaatcgccatatccggagtcagcgcatagtctgccagcggatatttctgaccagtagcgtcgtcagttacaaccgcaaacggagtgacttcagaacctgtaccagaagtggtggtgacagcgatcattttcgctttcacgcccattttcgggaacttgtagatacgtttacggatatccataaagcgcagcgccagctcttcgaagtgagtttccggatgttcgtacataacccacatgatcttcgcggcgtccatcggggaaccaccacccagcgcgataatcacgtctggtttgaaggagtttgccagttctgcacctttacgaacgatgctcagggtcgggtccgcttctacttcgaagaagacttcagtttcaacgcctgctgctttcagtacggaagtgatctgatcagcataaccattgttgaacaggaagcggtcagtcacgatgagcgcacgtttgtggccatcagtaatcacttcatccagcgcgattggcagggagccacggcggaagtagatagatttcggaagtttgtgccacaacatgttttcagctcgcttagcaacggttttcttgttgatcaggtgtttcggaccaacgttttcagagatggagttaccaccccaagaaccacaacccagagtcagggaaggtgcgagtttgaagttatacaggtcaccgataccaccctgagacgctggggtgttaatcaggatacgcgccgttttcattttctgaccgaagtaagaaacgcgagccggttggttatcctggtcagtgtacaggcaagaggtatgaccgataccgcccatagcaaccagtttctctgctttttctaccgcgtcttcgaaatctttagcgcggtacattgccagagtcggggacagtttttcatgtgcgaacggttcgctttcatcaacaacggtcacttcaccgatcagaatcttggtgttttctggtacagagaagcctgccagttcagcaattttataggctggctgaccaacgatagccgcgttcagcgcaccgtttttcaggataacatcctgaacagctttcagctctttaccctgcaacagatagccgccgtgggttgcaaaacgttcacgtacagcgtcataaacagagtcaacaacaacaacagactgttcagaagcacagattacgccgttgtcgaaggttttggacatcagtacagatgcaactgcacgtttgatatcagcagtttcatcgataacaactggagtgttgcccgcgcctacaccgatagctggtttaccggagctgtatgcggctttaaccatgcccggaccaccagtcgcgaggatcaggttgatgtctgggtggtgcatcagtgcgttagacagttcaacagaaggttgatcgatccagccgatcagatctttcggagcaccggcagcgatagcagcctgcagaacgatatcagccgctttgttggtggcatcttttgcacgcgggtgcggggagaagataatggcgttacgggtcttcagactgatcagcgatttgaagatagcagttgaagtcgggttagtggtcggaacgataccgcaaataataccgattggttcagcgatagtgatggtaccaaaagtgtcgtcttcagacagaacaccacaggttttttcatctttataggcgttgtagatatattcagaagcaaagtggtttttgatcactttatcttcgacgatacccatgccggattcggcaacggccattttcgcgagtgggattcgagcatctgcagcagccagagcggcggcgcggaagattttgtctacttgctcttgagtgaaactggcatattcacgctgggctttttttacacgctctacgagtgcgttaagttcagcgacattagtaacagccataatgctctcctgataatgttaaacttttttagtaaatcatctgctcgaatacgagagtatagtcagtgcggtgatgatttgcttaacctatgaaaatcaaaagcttactcgcgctcacactcactgtgatttactaaaagagtttaaacattagagttattatctctaatgcgtcacttccaggtggcgtaagcaagattactcacttctgggtactgattacgtgatccaaatcaaatttttgcaaagctgacacctttcagcatcgcttttcgccattatagctaacagttaataaattgtagtatgatttggtggctacattagcatgttttgcacaactagataacaataacgaatgatagcaattttaagtagttaggaggtgaaaaatgctgtcaaaaggcgtattgtcagcgcgtcttttcaaccttatttatggctaacattatccggcttttgcttcggagctaaccgtgattcagaccttttttgattttcccgtttacttcaaatttttcatcgggttatttgcgctggtcaacccggtagggattattcccgtctttatcagcatgaccagttatcagacagcggcagcgcgaaacaaaactaaccttacagccaacctgtctgtggccattatcttgtggatctcgctttttctcggcgacacgattctacaactttttggtatatcaattgattcgttccgtatcgccgggggtatcctggtggtgacaatagcgatgtcgatgatcagcggcaagcttggcgaggataaacagaacaagcaagaaaaatcagaaaccgcggtacgtgaaagcattggtgtggtgccactggcgttgccgttgatggcggggccaggggcgatcagttctaccatcgtctggggtacgcgttatcacagcattagctatctgtttggtttctttgtggctattgcattgttcgctttatgttgttggggattgttccgcatggcaccgtggctggtacgggttttacgccagaccggcatcaacgtgattacgcgtattatggggctattgctgatggcattggggattgaatttatcgttactggtattaaggggattttccccggcctgcttaattaattcctttcaaatgaaacggagctgccatgctccgtttacttcgtcattatttttactttgttcccgcgcagttatcaaaagcaaaaggaataggtaaaaatattcttctcaaattacagttagttataaggatttccttaactgcttctcctcaccatcatgttattttcgccacatcataatcctgggcttgctgaagaataattgaaatgatattattaattccactgcctttggtagaggaaagtgctaaataataatcaattgttaaattattgtgcatttcactactggaactgtaatcagaaaagatagacatgcttagccaatctctatttgattgaattgaaagatgtttgttaaggcatggatgcaagctatagattctgatacggtcaataaaagagaattgcttaacaattttgcaaaatgtattggcgagtaagaaccgcatttggtactttccgggcaaccgccagacgattctttattggtaatgagaataattaacaattaaagagcgtcgcgaaagaataatgtgtctcgacaggggagacacagtacgaatcgacataaggtgatcgtctgaatcaccagaataaataaagtcggtgggtgatgctgccaacttactgatttagtgtatgatggtgtttttgaggtgctccagtggcttctgtttctatcagctgtccctcctgttcagctactgacggggtggtgcgtaacggcaaaagcaccgccggacatcagcgctatctctgctctcactgccgtaaaacatggcaactgcagttcacttacaccgcttctcaacccggtacgcaccagaaaatcattgatatggccatgaatggcgttggatgccgggcaacagcccgcattatgggcgttggcctcaacacgattttacgtcacttaaaaaactcaggccgcagtcggtaacctcgcgcatacagccgggcagtgacgtcatcgtctgcgcggaaatggacgaacagtggggctatgtcggggctaaatcgcgccagcgctggctgttttacgcgtatgacagtctccggaagacggttgttgcgcacgtattcggtgaacgcactatggcgacgctggggcgtcttatgagcctgctgtcaccctttgacgtggtgatatggatgacggatggctggccgctgtatgaatcccgcctgaagggaaagctgcacgtaatcagcaagcgatatacgcagcgaattgagcggcataacctgaatctgaggcagcacctggcacggctgggacggaagtcgctgtcgttctcaaaatcggtggagctgcatgacaaagtcatcgggcattatctgaacataaaacactatcaataagttggagtcattaccaagtcggtgatagtaatacgtaacgataaagtaacctgacagcagaaagtctccgagcctgtgcagggtcccaatccgggattacacatgctggttaataccagtaattataatgagggagtccaaaaaacaatgaccaacatcaccaagagaagtttagtagcagctggcgttctggctgcgctaatggcagggaatgtcgcgctggcagctgatgtacccgcaggcgtcacactggcggaaaaacaaacactggtacgtaacaatggttcagaagttcagtcattagatccgcacaaaattgaaggtgttccggagtctaatatcagccgagacctgtttgaaggcttactggtcagcgatcttgacggtcatccagcacctggcgtcgctgaatcctgggataataaagacgcgaaagtctggaccttccatttgcgtaaagatgcgaaatggtctgatggcacgccagtcacagcacaagactttgtgtatagctggcaacgttctgttgatccgaacactgcttctccgtatgccagttatctgcaatatgggcatatcgccggtattgatgaaattcttgaagggaaaaaaccgattaccgatctcggcgtgaaagctattgatgatcacacattagaagtcaccttaagtgaacccgttccgtacttctataaattacttgttcacccatcaacttcaccggtgccaaaagccgctatcgagaaattcggcgaaaaatggacccagcctggtaatatcgtcaccaacggtgcctataccttaaaagattgggtcgtaaacgaacgaatcgttcttgaacgcagcccgacctactggaacaacgcgaaaaccgttattaaccaggtaacctatttgcctattgcttctgaagttaccgatgtcaaccgctaccgtagtggtgaaatcgacatgacgtataacagcatgccgatcgaattgttccagaagctgaaaaaagagatcccggacgaagttcacgttgatccatacctgtgcacttactattacgaaattaacaaccagaaaccgccattcaacgatgtgcgtgtgcgtaccgcactgaaactaggtatggaccgcgatatcattgttaataaagtgaaagcgcagggcaacatgcccgcctatggttacactccaccgtatactgatggcgcaaaattgactcagccagaatggtttggctggagccaggaaaaacgtaacgaagaagcgaaaaaactgctggctgaagcgggttataccgcagacaaaccgttgaccatcaacctgttgtataacacctccgatctgcataaaaagctggcgattgctgcctcttcattgtggaagaaaaacattggtgtaaacgtcaaactggttaaccaggagtggaaaacgttcctcgacacccgtcaccagggtacttttgatgtggcccgtgcaggctggtgtgctgactacaacgaaccaacttccttcctgaacaccatgctttcgaacagctcgatgaataccgcgcattataagagcccggcctttgacagcattatggcggaaacgctgaaagtgactgacgaggcgcagcgcacagctctgtacactaaagcagaacaacagctggataaggattcggccattgttcctgtttattactacgtgaatgcgcgtctggtgaaaccgtgggttggtggctataccggcaaagatccgctggataatacctatacccggaatatgtacattgtgaagcactaatggcaatacgtggggcaggagtgtcctgctccacggtgtctgatttttatcgcattacagaaggcacaggccagaaggtagggcaatgttaaaatttattctacgtcgctgtctggaagcgattccgacgctatttattcttattactatttcgttctttatgatgcgcctcgcgccgggaagcccttttaccggcgaacgtactttaccgccagaagtgatggccaatatcgaagcgaaatatcatcttaatgatccgatcatgacacagtatttcagctacctgaaacaactggcgcacggtgatttcggtccatcgtttaaatataaagattattcggtcaatgacttggttgcatccagttttcccgtttctgccaaactgggagccgcagcatttttccttgcggtaatactgggtgttagtgctggcgttattgccgcattaaaacaaaacaccaaatgggactataccgtgatggggctggcaatgaccggggttgttatccccagttttgtggttgcaccattattagtcatgatatttgcgatcattttgcattggctgccgggcggtggctggaatggtggggcgcttaaattcatgatattgccgatggtggcgttgtcactcgcttatatcgccagtattgcgcgtattacccgtggctctatgattgaagtattacactccaattttattcgtactgcccgggcgaaagggttacctatgcggcggatcattttacgtcacgcattaaaacctgctctgttacccgtgctctcttatatgggccccgcatttgtcggcattattaccggttctatggttatcgaaaccatttatggtttgccggggattggacaactgttcgttaatggcgcattgaaccgtgactattccttagtgttaagcctgaccatcctggttggtgctttaaccattttgtttaatgccattgtcgatgtgctatatgcggttatcgacccgaaaatccgttactgatactggagctcgcgatgatgttaagtaagaaaaacagcgagacgctggaaaatttcagtgaaaagctggaggtcgaagggcgcagcttgtggcaggacgcacgtcgacgttttatgcataaccgtgcggcggttgccagtctgatagtgctggtgctgatcgcgttatttgtaatcctggcaccgatgctttcccagtttgcctatgacgatactgactgggcgatgatgtccagcgccccggatatggagtccggtcactactttggtactgactcatccggtcgcgacctgcttgtgcgcgttgcgattggcgggcgtatctcactcatggtcggtgttgctgcggcactggtggctgtggtcgtcgggacactttatggttcgctttccggttatctgggcggtaaagtggattcggtaatgatgcgtctgctggaaatcctcaactccttcccattcatgttcttcgtcattttgctggtgacctttttcggtcaaaacatcctgctgattttcgtggcgataggcatggtttcctggctggatatggctcgtattgtgcgtgggcaaaccctgagtctgaagcgcaaagagtttattgaggcggcacaagttggcggtgtatcgacatcgggcattgttattcgccacattgtgccgaatgtactcggtgtggtggtggtctacgcatcacttctggtgcccagcatgatcctctttgaatctttccttagcttcctggggttgggtacgcaagagccgttaagcagctggggtgcattgctgagtgatggcgcgaactcgatggaagtctctccatggttattgttgttcccagcgggattcctcgtggtgacgctgttttgtttcaactttatcggcgatggcttgcgtgatgccctcgacccgaaagatcgttaaggagtgcagccatgagcgtaattgaaactgcaactgtgccgctcgcacaacaacaggctgacgcactgctgaacgtgaaagatttgcgtgtcacctttagtaccccggacggcgacgtcacggcggtcaatgatttgaatttttccctacgtgccggagaaacgctgggtattgtaggtgagtctggttcgggtaaatcgcaaactgcatttgcgttgatgggcctgttggctgccaacggacgtattggcggatcggcaaccttcaatgggcgtgaaatcctcaatttgccagagcatgaactcaataaactgcgcgctgaacaaatctcaatgatttttcaggacccaatgacttcgttgaatccctatatgcgcgtcggtgagcagttgatggaagtgctgatgctgcataagaacatgagcaaagctgaggcgtttgaagagtcggtgcggatgctcgatgcggtaaaaatgccggaagcgcgtaaacgcatgaaaatgtacccgcacgaattttctggcggcatgcgtcagcgagtcatgattgcgatggccttgttatgtcgacctaagctgctgattgcggatgaaccaacaactgcgctggacgtcaccgtacaggcgcagatcatgacgctattaaatgaactgaagcgggaatttaataccgccatcattatgatcacccacgatcttgtcgtggtggcggggatctgcgacaaagtgctggtaatgtacgccgggcgcacgatggaatatggcaacgcgcgcgatgtcttttatcaacccgttcatccttattctatcggtttgctcaacgcggtgccgcgtctcgatgcggaaggtgaaacaatgttgaccatcccgggtaatccgccaaacctgctgcgattaccgaaaggttgcccgttccagccacgttgtccgcatgcgatggaaatttgtagtagcgcaccgccgctggaagagtttacgcctggccgtctgcgtgcttgctttaaaccggtggaggaactgttatgaatgctgtaactgaaggaagaaaagtcctccttgaaatcgccgatcttaaagtgcactttgaaatcaaagatggcaaacagtggttctggcaaccgccgaaaacgctcaaagccgtcgatggtgtcactcttcgcctgtatgaaggggaaacattaggtgtggtaggggaatcgggatgcggtaagtccacctttgctcgcgccatcatcggtttggtcaaggcgaccgacggtcatgttgcctggttaggtaaagagttgctgggcatgaaacccgatgaatggcgtgccgttcgcagtgatattcagatgattttccaggatccgttggcatcgctaaacccgcgtatgaccatcggcgagatcatcgctgaaccactgcgtacttatcatccgaaaatgtcacgccaggaagttcgcgagcgcgtgaaggcgatgatgctgaaagtcgggttattgcctaacctgattaaccgctatccgcatgagttctctggtgggcagtgccagcgtatcgggattgcgcgtgctcttattcttgaaccgaagctgattatctgtgatgagccggtgtcggcgctggacgtgtcaattcaggcacaggtggtcaacctgctccagcaattgcaacgtgagatgggattgtcattaatttttatcgctcatgacctggccgtggtaaaacacatttccgatcgtgtgttggtgatgtatctcggccatgcggtagaactggggacctatgatgaggtctaccacaatccactacatccttacaccagggcattgatgtcggcagtccccatacctgatccggatctggagaagaacaaaaccatccagttactggaaggggaattaccgtcgccgatcaacccgccttccggttgtgttttccgtacccgttgcccgattgccggtccagagtgcgccaaaacacgtcctgttctggaggggagtttcagacacgccgtttcttgcctgaaagtcgatccgctttaaaaacaataagggctgacagttgtcagccctttttcacgctaaaagcgattatttattcccgccagatgatatggcaaagtttgtgatctttttcgcggcataacagaatgcgggcaaaaacatcgttgatttcaccatcttcactgtccgccagaccaatcaccacttcggcaaaaaagtccgggttcaaatcgaaatcaacatgttcctgccagtcttccgccggatcgaataactccgcgccgccgcgctcttcaaactgaagattgaacagcagaacatcagctggatcgagattgtcggcagccagttcgagaaaaatatcgtaggcctgttcaagcgtttcatcttcagtcaggcgattgtttagatccatatccatagttactacctgtttaacctctgttggcgacgttttacagcaacggactgaagaagtaaaacagtcgctcggcgacacgttgccataatggacgttttagccataaacgggcatcgagcagacgtgaacgcgaaatataatcgtcctgaacggcggcgaggtcagcaccaaaacctttatcgtcgattgccagggtaatctcgaaatttagccacagactacgcatatcaaggttaactgtgccaaccagacttagttcgccatcgaccagcacgctcttggtatgcagtaacccgccttcaaactgataaattttaaccccagcagccagcagttccgtaaagaatgcgcgactggcccagccgaccagcatcgagtcattttttcgcggaaggataatactgacatccaccccgcgctgcgccgccgtgcaaatcgcatgaagtaaatcatcgcttggcacaaagtagggcgtggtcatgatcaaatattcacgcgccgaataagccgcagtcaataatgcctggtgaatgagatcttccggaaagccggggccagaagcaattgtgtgaatggtgtgaccgctggcctgttcaaacggcataatattgacatctggtggtggcggcagaatacgttttccggtttcaatctcccagtcgcaggaataaataatccccatcgcggtggcgatagggccttccatacgcgccatcagatcaatccattgccctacgcccgcatcttgtttgaagtagcgaggatcgaccatattcatgctgccggtgtacgcgatgtaattatcgatcatgatcatcttgcgatgttggcgcaggtccatacggcgtaaaaacacacgcatcagattgacctttaaggcttcgaccacttcaataccggcattacgcattagctcgggccacgggctgcggaaaaaagccacactcccggcggagtcgagcatcaatcggcaatgaatgccgcgtcgcgcagccgccattaatgattcagccacctggtccgccatgccgccgggctgccagatataaaacaccatctcaatattatggcgcgcgagctggatgtcgcggattaacgcctgcatcacatcatctgactcggtcatcagttgtagctgattccctttgaccccagcgatcccctgacgacgctcgcaaagcttgaataatggcgcagcgacactgctattttcttcggcgaagatatgcttacaggctttaaggtcgttaagccattttgcggtggaaggccacatcgctctggcgcgctcagcgcggcgtttgcctaaatggagctcgccaacggcaagataggcaataattccgactaacggcagaatgtaaataatcaacagccaggccatcgcggagggaactgcgcgtcgtttcattagaatgcgtaaagttacgcctgcaatgagcaaccagtatcccagaatggccaaccaactcaccaacgtataaacggttgtcatagattagaaatccttttgaaagcgcattgttatgagtttacgcatatggattcatctggcaaataaaaacgcgggaaaagcactggtcagcgtcgggggtgggggtataatgaccattctgttattgcatagagtagttaacatgaagcggagtagaacggaagtggggcgctggcgcatgcagcgtcaggctagccgacgtaaatcgcgttggcttgaggggcaatcgcgccgaaatatgcgtatccacagcatcaggaagtgcattctaaacaaacagcgtaactcgttattgtttgcgatctacaatatctaaatgtactgggcaccattgcggtgcccaataagtttactcttccgtctttaaactctatttttgcgccgattctttactgtcagctttcgtttctagttcatcgttatcgctgaaaataccatgacctgagttcaacaacattgaaacgagcatatcattattaatctcttcaccatttaaaactcgcgccagaatttcgctgccaaacagttgcggtgagagaatgatatccggatgtaccatcttaatcttattcaggtttttgctatcactgacggcgagaactgttttgacatcactgctcatatcttttgccgagagtacaacaaacgcgttatctgcatcgttatcactcagcgccagaatggcccggcaacgatcgattcccgctttctttaatacagaactgtcattactgtcaccggggataacatcagcattatcgcctaagcgttgctcaagttgcttgatatcatcttcaggcaagttgctgataaccgttacgttttgtccgcgttgattcagttgcaggatcgtattgatggcgagaatcgaatgtccgcaaacaataaaatgatctttacgatgcattgtatgattgtttccttttacaagtttgttgaatcccccgcggataagcggaccaaaaattgaggtcatagatgtggcaaaaacggtaatgccggaaataatgaccgaaatagtgaacaatcgtgctgattcagaaacagggacaatatcgccatagccgacggttgacatggtttctatcgaaaaatagaacgcggtcatcaaactttctattcgcggattaaaaccttcgcttaaataaagcgcaccgtaggttgagtaaaacagtaatgtcgtgaaactaataaatgcaaaaattgtcccggctgcggcgctactgtgggagaagtctttgcgcagtatcagcaaaaacaccagcgtaaaaatgcaaaatccaatactaaatttcagccagggataaaaatgcagggtgtaaattagcgctatcaacaacaaaatgatactgattgcccatgcgagctttgcccggaacagtaagccaatggagttcaggacaagaaagacgccgagcataaagagtggggcgtttgccagcaaggagagatccaactctgaaaatgctttgatatggaaaatatcaagcaaattgaccgacataccatagattgttttaaaaataagcaatccatttaaaaagacggccagcgcgagaatgtcgtgccgaagggtcacccataaatttgttgctgtttgtttgaatgtagcccagtgactcactgatacctctgtaaccacaattttgtttaattatcttagcgtgcacattttctgaacatacatgcagcgcgtgaatgtgttaaacaatagtagatgactttatccgcagtaatcaaaggatttgagcgagcaactgtacctcaggaaaggtcatttttcctgaatatgctcacatcatataaagaaatacagataaagttattatctgcttgtggtggtgaatgcactgaccggctataaggaaaggccaaacaagaacacggttgcaaaaaccgtgcccttaaatattgaatctctattcagaacactttcttaaattgtcatttggcatattacgaacaattccgcgtaaaaacgttctgttacgctaaacccttatccagcaggctttcaaggatgtaaaccataacactctgcgaactagtgttacattgcgtgtagctttgagtgggcaactttgtgtacacttttgtgtacccaaaaacaaaaatgtgtacccattcaatgatcaccgacacaaagctcaggaaggcgctcggcaagaaaagagatgatatcgagattatttctgattcgcacgggctcaacgccagaatcagccaggccggaaaaatatcatttttctatcggtatcgctgggccggtaaagcggtaaaactcaatgttggtgattatcctgcaatgagtatcacccaggcaagagagcgtcgccaacaattcagaaactggttaactgagggactggatccgcgagagcaggtgaagctggataagcagacccgacaggaagcgatgtccgttgccgaagcgttcaattactggattgaaaggcactgtatcgctaacgggctagttaaagtcgattactatcgccaggtgtttgagaaacatatcgccgaaccgatgaagaatgtcaaagtcgataacacagcgaaaatgcactggatcaacgtcttcgattctatagaaagcagggtgatggctcattacatgctttcgctgtgcaaacgggcgtttaggttctgcgttaacagaagtgtgatcgcctcaaacccactcgagggattactgccatctgatgtcgggcaaaagcctaaaaagagaactcgcaggatggacgatgacgatctgcgcaaaatctatcagtggttgaaaagccatatgtcgatagagtccgttttcctggtgaaatttattatgcttaccggatgccgtacggctgagattcgacttagtgagagatcatggtttcgattggatgataatgagtgggtcgtgcctgcgggcagttataaaactcgggtacatattagaaggggactctcagacgccgccgttaacctggtcagaaatcacctcaagaaaataaacaccaatcacctggtgacttcacaacgtaaaattgatggcgggatcaaagattcgcccgttcattcacctgtggcatccaattacgcccgttctatttggaatggaacaggtatggcagagtggtcgcttcatgatatgaggcggacgatagccacaaatctctctgagttaggttgcccgccgcacgtaattgaaaagctgctcgggcatcagatggtgggggttatggcgcattacaaccttcatgactatatcgatgatcagaaacactggctccgcgtttggcagagccatcttgaagagatcatcggagagcccttcagttaatttatcttctttttatcctcccactctttgattgactcagagcgccagcggttagggttgccgggccagtcagggggtgggaacgggcatacgaagccccgaggcattgtgtctgcactttgccatgaccaaagggttttgcgtgaaattttgtagcgactggtcaggtctgacgttaccaaaatatcatccatagctctctccagttgcccgttcgggccattcaaaatctttttcaaccaacctgcccgggcagggagcggagacggcgcatgccggtcatcgctgtggccacgtagctcgcctttcggttcaccacctccacccagactttcacgccttcaaccttcaccgtataagtctctttcatcttgcttcgcccatagtcgccatatgtttgcaagtgagctgccagcgcaacatcgcaagcgcggcgaccaataggtgattgcttactgcgattaatcagcttcatcatcactgcactcccaaagtggctacgacatcactcgctgtttcgcgggtactgcctttgctggatatagcccggcgagcactgacgcggtgcagattgaagccgtgctgttcgtaaagttcaattacgcgcggtgcggtagaattgctgatcaccacttttgccccccgctggtgggctgccacacagctttccgcaagctctacctggctatcccatgagaacccaccagccgcgtagttagtgaaaccagcggtgccgggaagcggctcataaggcggatcgcagtaaacgacgtcaccatcacctgccagcgcgagcgtgcgcctgaagcctgcattcatgaatacgcatgcgtgagccttccgcttaaatgccttgatctcttcttccgggaaatatggcgctttatatttcccaaagccgacgttaaaaaaaaccgtccaggttgtaacgaatcaggccgttgaagcagtgccgattgaggtaaaggaatgctgctgcacgctcgaccgcatccagccgctgcgcgttgaatgcttcacgaattaacgtatagttttcggcatcattaagatgcctgaatgccttcattgcctcatagatcaccgaatcggggaccaccgccagcatctgatacaggttaatcaggtcagcgctgacgtcagccagaaggaagcgttcgtgcttgtctgagttaaggaacaccgagccgccacccacaaaaggctcaataaggcgtttacctgcggggatcaaacgatccagttccggcagcagcgaatatttgccgccagcccatttaaggaacgggcgctgccagctgcgcagcgccggttcttctatgggcatcgccgcagctccactgcaaacagatccgtatctcatgctgcctcctgcctttcccgatattcctcagcgagccgctgcgcctttaatggattgctgaccacttcaccccatggtattagccagcagttaccaatgaaggggaggcacagtgtgcctacgctgatgtcgtcgtgagcgtgagtcataggatggactccatttcgtcgatatagaggccctgagcaatcaggcggcgacggcgtgctgcacgttcaatgcactcctgccgcctgccttcctgcgactgctctatggcgcgccgggtgaacagccgagatttaccctgcggcgtaatgacctttggcttcgtaaccaggtcgaatgtccggtcgcagatgccgtcctcgttgatccatttttccgactcaacgatctgcgctatctgtccggtgccgcgggtgatgccgttggcgacccggttaaactcaatgagcgatacgccaaacttctcggcgatttcgctgccagtgaccgggcggccgcgcgtctgaatcatccagataacgcgttcacggaggccggagaattgcccggctcgcccgggcctgcggtagaatggtgtgcgtttcatttccactgttccccgaacgtgaagccgatctctgccagcgcctcgtccatcttctcgatgaactccggcaccatttcgttgaaatcggacatgtactgaggatcccgctcaacgacgacgtggtgaatgccttcgcgtttcatgcgcgggtcgtagtttgcaaagaaccatgcgtcttttccggtcacccacatgctgtactgcacctgggccatgtacgcagacttgatggcttcgaaaccgccaaggcggaatttcatgaagtcgcgggaggtgaaagggcatttaagctcaaggccgaacccgttactgcacaggccgtcaggggagcaggcggtgcgcatgctctcgtcacggaacaagatcggagactccgtgactttcacgtcagtggtgaactcgaagagggtgcgggcgtcttcttcgtactgcttgccccaggccagcgccttggcgttaacctctggcgctacaccggtgcatacctcggcgagcaaggtgtggaagtaggacattttcatgtctgtccatttgctgccagatcgaggcttggaaatgacgttgtgagcgtcagaggcagtaataactccgagccttaatttggcccatgcttcatcaccttgctctacggtggacacatctatgccggtccgggccaggataatttctggtgtcatgctgccgccttcttcttgaggaagcctaaggccttaactgcctcggcttgggtaagctcggatgaatcgcgaatatcacgacggaaaatttgcgaacagactgggagcaggttttcttcccatgtcttatccattgcgataaggacgtcgttaatctccttgataatttcgtctcctgctggggttacatcgcgttctggctggcgttctgctgagaagttgataccttcctcaccctcggtattaacatggtcgatggcggcatccaggcgctcacgtcgaggccagtattttgctgcctgcttcacgaccgtctttaggatcatctgctcttcatcggtgacccatggacacttcttgctgttgtcagatttgtacttcttccatgcttcagaccggtcacggatggagtagatggcatcgatgcgcatcgtatgggtaaggtaatcaccatcgtcagtttttaccgttacatacgcccctacaatgtccccgcgctgctcttcagtatcaaagtcgttgtagatgtggatcggcggcttatcgagcccctcgcggcggaactggtcgtttcttcgaacaatagccgactggcaccacttaatggcgccagactgctgcgcgatgtgcatcaggcccatgtaactgatgtcgaggcaaatagcccctttacgcggaaccaggtaagccagcttctgagctgggtttagcgaaataccgatagccgcaacgttgatgatcgcgttctgtgtgctggtctggttctggaatgcaactttcgcgaggtagtcgttgttctgaaatagctggatggcgaactgactttccttcgcccacaccatccgctcgtcagtggccgccttaatgaaaagcggctcctgttgtttgacgaaatcaacaagggttaagctcatagtccctccttaaaatgggcagattggatgaaggcgatcccactcttcttcggcgcggtcgtaacagatgcgtgtgacatagtcgttataggcttcctctgccttttcaccgactagtgccatttgcgcttcttttgggagaaacaggctactcatttgcagagcatatttcgggaacatggcgatcagttctttcgcccggtcgtcgatccacttctctttctcgtcggtgagttgctgctcaacccagcgccgttcttcgatgcggtcgtaagtgaggtatgcgttcatgtttgcctcaatatttgatgtgcgcgtcctgcactttgccgccagcgatcgccagcactgctttctgtgcgtattcttctgggatgccctgagcaatcagatctgcgtagacacgacgattgacggtgcggcggtgctctttgtctgcggctcggcgcgcttcttcttcagctttgcgctgctcttcgaccaaacgggcggcttctgcctcttcctggcggcggcgctcggcggcaacggcttcttctttttcgcggcgcgcacgctcttcggtttccttcttctcgcgttccgcacgctgttccgcttcaatgcgctggcgttcagccagctctgcacgtgctttctcttcagcttcacggcgcgctgcggcttcaatctccgctttgtgcttcgcttcggcatctcggcgggcttgttctgctgcttcgcgcttaatgcgctcttcgtgctcacgccgagcctgttccgccaggcggcgctgctcttcgcggtcacggtcgaaatccttgttcatcagcagagccatttcgtggtctgcttcgaacttggccgccaactcctgatcgaacttgatgttcatttccagcgcttcggcgtgcagcgcgttcatggcttcttcagccttaatgcgttcctgctcggcttcccattcggtgagtgggcggcgggttgcgtcgcgaagctcgtcacatgcatcaacgaaacgcttaatttcggcctcagcaggtcgcacagcctctttcaggcgcttcaggtactctcggcccggcttttcaattgccgtcttactgcgtgatacctgcgctgccagagaggcgacacggtcacgtcctttcttcgtggacaggtccggcacttcgtttactgcctggcggatttgctcgagataagcatcaaggccgcccgctacgtaaagcactggggcctgttccggcttgatttcgatgacagttaagtccgttacttcgctcatggtttctcctgaaattttgatgtgcagatctcgccctctggtgacaggcagcagttgaattggttaagggttatttgcctatggatctgaaaatgcgtatatggctagttgattgcttcgttaagcattttctctatagccagcttgccgtcatttatctgagcaacttgcttatcgaagttctcttggtagtgggcgagattcttttccgatgcagagaataggcgttctttgattttttgtaactcatccctgctgaaaacaatgcccatattgcggcactttttgacatcatcaatgctcaggccgttaccattgagtttttccagggcaatgcgcttaacacactgcctggcttcttcaatagtcttgtagaactcaaccgtatcgcttccaccactgccatctgaatagcaatttactcgtaaagctatatctccattagtgctgcccaaaagagataagcacttgataccttcaaatttcttacgcccatagtagttgtcaattgaagacataaaatcttcatatctttcaatggacggcacaccgtaatcacgacgaatggcaaatttaacctgcccggtcattacatctgcgaaatggtccaggtcagcatcattgatatgatctgagaacgcttttacctgcttaaccatttctctccagaaacttaatgtattctgtaggttgctaatttccgagttgatcttttcaattttcaacttcgcatcagcaagggctttttcttgttttgctttttcacgagacaaccatgattcaactggctggtcatgtagactcttcaccacaaaacgctcgccaccagggatttcatcaccctgctgcgtgacaaacacttcctggacgatcgtttcctgattattcaacgcaccaacgacaacgaccttacggccgtcagaaagaaatttagtttccatgacaaagtccttaatgggtgagagggttgccgtgaccgtccagaaggacgtcaatcacgcagtcactgaggcggatgatttctgcgtcggtgtgcaggtagacccatttgcgctcctgaatgactgctgagacgcgatatgtgcggccttcatgcaatgccatcatgccgggcgtgacgcactggcgaatgagcggggtggtgccgtagtggttgatcatgccttcacctcaacctgttccaggaggccagccagcttcatatgccagcggttcatcgtcagcttttcacgcgggttagataccgacgtcagctgccactcgttatcgttgagctttttggcggtgtactgcttgccgttgtgggtgactgtcatctcacaccaccttgaataagaaccagcccataccgcacacaatcaggcccacaatggttattgcggaagacatgcgtacatggtcaatggctagttttgaaagtggctggcgatgttcttttttcgtcagcgagttgattgctatgtcgagcagaaacgtcccgacaaaccataatgcgtatatctttaagcccaactccaaatcactcataaatcctcttggccttatcgcggcgaacggaacggttaatacaagacttcaacgcatttattcagtgtttcaatggtcggtggatggccgccggttgtcataacttgagccactcgtaaatgactccaggtatgaaaaagccgctggttaggcggctattgaggttcgcgcggcttgtggtcgaatcggtgccacccgtcagttaattcaaatggagcataactttcccggcgctcagcgaacccaagctcaacagacagagcgtgcagctcatgccgacgcttaatctgttccatcgcaatccagtcagcatcggcattgcgcttttgagcttgcttcggcgacaggtctaaactgtttatttcacttagtttctgctgacgcttgatgtcctgtttcatattgcgaagcgcatttatcattgagtcgatgcgcttgatgtcgtcgatcatccccttaccctctgtcgttacccgctgatgcgggagaaatgctttggcgatgtggtaggtgggagacccatttcgacccgattcggcctacttatcttcggcaatagctcctcgggcctcgccgctttacgtgcgacatattcccgtccatgaacccttcaccacatcccataacattccctgtattggtcagcgccaactccctgccagtgttgcccgttctcacgccgttctcgctctcgcgcggggatactctctcaccgaccggatcgcacccggtgatacagcacgtttacgtgtaggggtcttaacaggtcattgacgctgtaaatctgcatgttgttaaaaagcaggcgacttgctgtccgccgctggctaacttcgctcagctgtcgatgtttcgtttcgatggagtaattaaacatcatgtggatttgtaggtcaacaccttgtggatttattttgttgatttaatcgtttactgttgatttttatgttgatttattttttggtggcataagtgatatgctgaaaaaaacatcaaaaaggagtgggtaatggacttggatgaagaaagagtgaacatgatggttcacgccatggggcgggcggtcatggagttgtcactggcagatttacctatgacccagcaaaacatcatcgacaagctggaacggtaccggaaggaaacgggaaacgtgataggtaagggtgtgaacagggatgcagctgagatagtcaggaagggtagtaaagctgtgaagtaggcacaaaaaacccggcgcggtggccggttgttaaagctcaatatcaactatgaaaagtttactaatagccccttttctaactgctgctttggcagttacttttaccgctgactcatgacttagacccgttgacagaaaacgactaagtgaaatgagatacgggttgtctgcctttgaagcagatggatcgcttatttgtgctgagatgcgcttatctgaatcatcaccttctataatgactttagcggtcattcggtgagcgtcgaattcagtaaggaagattcgatactcccttaagccaagaacttcgtcgtcgtccaactggtctattactgctttatcttgctcatcaattacagcaggcttgaaaccattccccggtgtgacgcttatcttattacaggtggtaccgatgggggaaactgcctgtctaactgatgggcgtaactcactagccatcttgtcaatcactgagattagacctgagatggtatctttatctttatttccgagggcctcaattgccttctcaagtgcttcttttaggtatttcatttcctctttcttctgcgagtttttagcgaagatataaggcactaatgcgccaagtatagcccccgcagaccctgagaacaattgagactgactgataaaattcatgatagtatcaagagaaaaacaattggccctagcttcggtagcgtaaattttaacctcttgagttgaggtgcttcgcgagtacttttgggttaatgcgaaggttccagctgtagctaatatcttcgaaaatccctttagcgattcaccgagcgaagaaagttcaatctcatgcttttcagcatccaaaccgtcatatctaagtgaaaaattaacatcgtgtaagccagtgttttccatcaacagtccttatatgctttcaccaaaacgtctcatcaggccaccataagcacgatcgcaacaaccgagagcaaagtaaccacgcctactatcagatattctctcatcacccaaacgtctcttcaggccactaaaattatcggcgatatcgcaataccgagtaccagaacacaaaaccgattatctcgacatctgcctcatcggcctcttcgtcgtcataatcacgattaatgcttctgattagaatttttccgcctggtttgcgataaagttgcttgatgcgcttcagatctccctggttgatggcgtagagttcgccgtcaataactcgcttattaccagtatcaacagctacagttgcaccatcaggaatgactggctccatactgtctcctgatgcaggaaaacacaggacaccagaaccatcactattggctccaactcgacggagcgttgcttttgaaaagcgcaatttaaaaccgttgtgatcctcatcgtgtactcgtccatcaccacacgcaaactcgatatccttcagaaacggtacttccacctcatcgtcaggtaggggggtatttttgtcccaagcgtcgacagttccccactcagactctggcgggatgttgctctccagatccttctttggagaaccctctccatttaataaccagtcaagagaataaccgaatttttcagatatttgttgcgccgcctcacgacttaacgcgtctctttttatccagttgttgacggtctgtgggctagtcgacaaagcctcagccaaatcccgctgcttcaagccttcccttgccagtaaaaatttaattctttcagaaatgctgctcataaaaccctccgctccatgcatggtaaacaacatgtggattttttccatcaccataatgttgatttaatccacgccatgaattaacatggtgttgattacacatgagcggagcaaaacatgatcaacaaaaaatccaacgccagcaccccgcttgagaaagccattaatgcagtgggcggctctcaaaaggtgcttgctgaaaaggtcggcgtaacgcctcaggccatcaatatgcttaaaaagcgaggtggcagccttccagtaacaaaaatgcgtaaatacgaagaagtaaccggacttcctcgcgaagttctatatccaggtatctttgccgcctaaccggcggctctaaccacgaaatggaaagcaatgcattcacttgcgtatcaacacaataccggaatacacccgggagcgatgataaaccgcgctcaacctaaggcggagccaggtcacgacaaaatccgcgatgcggtccgtgcatggtcgtcgtccctggacaatcaggacgtagtgtcagcgctgatcatcaacgaataccgggagcagggcggtaccgccatcagcttcccagaagacatcagcagggcgcgccagaaactttttcgctttctggataaccgcttcgactccgatcagtaccgcgagaacgttagagaactgaccccggcaatcatggctgttcttcctgttgagtttcgtacacgcctggcgccgcagaacgacaccatgtcgctgatcgcatctgccatgaaggaatgttcagaagcaaagcaagccgttctcctgaacgcgcctgagcaccagaaaatgaaggaggtaagcgagggcatagcgtcattgtttcgcctcatgccggagcaggtaggaccgctgatgacgatggttacatcgatgctgggggttatatgagaggcacaagaaaagaaaaagcccttgaagcggtaacttcaaaggcccttatcacactgtgttacggcaagtaacgggagtaagtatgtcaaacaccgctgaaataatcaatttcccaaataaaaccgaacaaccgggaggtcgtatggccgacctgtcgaacgggtataccaaggtcgctaacgagatccaacagcttaagcctcgcctgagactgtcaggccgggaatggcaatgttttgaggcggtgatctggcttacctacggctggaacaagaaacaggaccgcgtgacaaatacggttattgccgagcttacgggcctgagcgatacgcatgtatcggacgcgcttaagtctctcgcagaacgcaaaatcatcttttcacagaagcagggcatgatgaaaatcgtcggtgtaaacactgacctttcagcatggattttagacaaaccggaaacgggaagaaaattcccgaaaacgggaaaatccttcccgaaatcaggaataaccttcccgaaaacggtagacacccaatacaagaacaagaacagtattaaaagatcttcgtccgagaattctgacgaatcctctgacgcacgtctgaagaaatttttatcaactcatcctgaagctgcggtctacacaccatccggtgcgaagtggggctctgctgaagacctcgagacagctaagtggatttcctccagggtgaagctgattaacccaacctgcaaagccccggacatgacctcctggtctaacactgttcgcctgatgcgccagatagacaaccggtcgcaccaggacatctgcgcgctgtatgactgggctagcaaacaccacttctggcagaccaacatcctgagtcccgaaagcctgcgtaagcagtgggacaagctgacaatgcagcgtaacgccggaggtgagcagcgcgctgtcaagccagatctggacttcaacaacactgactgggcctatggggtgatccgatgaaatctcttgcagagcagatgcgtaaccacgaccgcgagcagatgagccgcatggcccataacctgccagagcagtaccaggagtgcgcgccggtcgagcaggtggcgcaggtattcaacaagctgttcaacgagctgcgcgccgcgttcccggccagcatggcgaacttccgcacccaggaagacctgaacgaattccgccgtcagtggctgctggcgtttcaggagaacgggatccacaccatggctcaggtcgatgccggcatgcgcattgcccgccgccaggagcgcccattcctgccgtcgccgggccagttcgtcgcctggtgcaagcagagcggcggcgcgctgggcgtcaacgttgaccaggtgatcgccgagtactgggaatggcgtaatcgttcgttcgaattcatctccagcgagcaatttccatggtcgcagccggtcatgtaccacatttgcgtagaattgcgccaccgcagcaccgagcgccagttaacgcatggtgaactggcacgcgaggcaggcgatctgctggacatgtgggaaaggcgcgtcaccgagggtaagccagtgccgccggtacgccgggctattgccgcaccagctgccgagcaagggccgacgccgatccagctgctgctggccaagtacaaccgcaacaagtcgaacgggatggtgtgacatgaacataacaatccgcgggcagattcttgcagccctgcgtaggatactgaggactaacccatgagcaccattaccaaagaatggctactgaagactatcgcggagcttgaagaagagcgagatgctacgccaggcgcagtgaacgaagacgcggcgatggcgctcgctgcgatgaagctagcgctggcatcgctcgaagcggagcctgtggcgtggctactgtcaggcggcggcgcaaaaaacaacgtcagcttcgatagtggcaatgcttatgccgcccagctgcgagaagtaacgccgctttacaccgccccgccagcgccggtatctgtgcccgctgcgatggaaattgatgatgactttgacagcgcgtttgaacacggaaaagctgtcggctggaacgcctatcgcgccgccatgcttcaggccgaacctgtaagtaatagtgatgagttaccgctggactatctgcaaggacacaaagacggcctggagtgggctgcacaattggcagaagccaatcatccgcaaacaggtgactggttgtacgacgaccaaatcgaacttgccagggcgattcgcaaaggtccggatatgcctactgttcagggtggcaactctccggtgattccagatggttgggtgatggtgccggttgagcttactccggatatgcgtgcagcatgggattcggctccgtacacagacgatgatgacaacgacatgcaggctgcataccgcgcgatgattgcagtagcaccgcagtggaaggtgaagtgatgcagaacccattcgacgcataactaaacgtcaagcaacgtttgataaaacactatcaacgagccataataaatctgccagcggcctgaacaaccctggcagacttctgcgcatttaaggggacttaaatgcgaccacaatatgaacttctcaccttgtcacagatgcagaaatgcacctgcgattttctgtattcttcggtttccgtcaaggaggccgtatgattatccccaaagacggcatcaagctacaccgtggaaatcttggtgctatcactcagcatctgaagccacttctcgaaaacggtgagtgcttccggctccaactcaaagactggcgcgagaagagaagcctttcacaaaatagtctgagccacgtttggtacaaggaaataagcgactacctgatcaagtctgggcgcactgacgcaacgcctgcatgggtaaagcgaaacctcaaaaaaacttatctgggttatgaagaggttgagtacaccgatttcgtcaccggaattaagacgattgaattagaactccgccacacgtccgatctggacactggcgacatgcaccatttcatgtgccaggtggaaggctggtgcgctcagtttggcctggtgctcacaatccctcaaagcagcgaatttcaggtgctgcgcgataagcaggaggcctgatgtcaactccactttcccgcgtcatcacaaacgaaatctttcgcgttccggcgcgccgcaagcctaagcccgcggttaagccatccgatatcccgaccctgaaagactacaccgcccgcctggtggatcagaaatggctgcgactcgcggcgaggagaaaatctgcatgagcatgtatcaacgcattaatggcgctgactggcgcaatattttcgtcgtcggcgatctgcatgggtgctacacgctgctgatgaatgaactcgaaaaggtttcgttcgaccctgcgtgtgatttgctgatttcggttggagaccttgttgaccgcggcgcggaaaacgtcgagtgcctggagctgattactatgccttggttccgggctgtgcgaggtaaccatgagcagatgatgattgatgggctatcggagtatggaaacgttaaccactggctggaaaacggcggcgtgtggttcttcagtcttgattatgaaaaagaggtgctggctaaggctctggttcataaatcggccagcctgccattcgtcatcgagctggttaccgctgaacgtaaaatcgttatctgccacgctgactacccgcataacgaatatgcgttcgacaagccggtcccgaaagacatggtcatctggaatcgtgaacgggttagcgacgctcaggacggcattgtctcgccgatagctggtgctgatctgtttatcttcggccacacccctgcgcgccagcccctgaagtatgccaaccagatgtacatcgatactggtgccgtgttctgcggaaacctcacgctggtacaggttcaaggtggtgcccatgcgtaaaccatcccgccgtaagtgcaaagtatgcggtgaatacttcgtgccgaaattccacgacatccggatccggtggtgcagcccggagcatggcgcaatcctcgcaatggaagaacgcaagaaggagaaggtgaaagccgcggctaagcgcatcaaggagcaaaaagaggctgaaaaggacgggcgcaaacgccgcaaggagcggctggcagagctcaggccagacggatactacaaggctcaggctcagaaagctttcaacgcctttatccgtgcgcgcgacgccgatttgccatgcatcagctgcggcgagaccaatccgcctgatctgcatggtggccagtgggattgcggccatttcaagacagtaggtgcttaccctgaactgcgctttgaagaacgcaacgcccataagcagtgcaaatcctgtaatgccggagctggcaagtacaccgccaaagaggcgaccgtggcgcagcaatacgaagctgggttggtcgctcgttacggtcagggatacgtcaactggctcaatggtccccacgaaatgaccaactaccgccgtgaagacttcatccggatccgggatgagtaccgcgacaagctcaaagcactgaaacagcgggaggcagcatgaaaccaatgatattcgatctcaagctacctcattgggcttttctgcttgagtgtccgttctgtggcggcggcgcagaacttttttctgatggtgatggtgtctacgccggttgttcaacaaagcaatgcttgattaagccgataactgacacctatccaacaaagcgcgatgcaattcgcgcctggaatcggaggccatcatgaccagagacgagataacccgataccaggccgaaagcgttaagcgcgccagcatgccgccaatagtaaagcacagccagaccaaaacccaccagccacagaaggaagccgcataatgaacctcgaatcaatcgctaaatactttgcgcctaaatcaccgatgttcagtgactctcctcgcgcaaccgcatcagacagtctcaccggcactgacgttatggcggcgcttggccttgctggccacaagtgcgggtttggtttcgatctttacctctcgaaaatcggcattagcagcccagatatagcactggagagactctatgagcaggcacgtaagttatcaggtaaattcagagcactgtctgaactcgatgaatcagctcggtcaggcgtgcttaaggttctctgcgcttttgcataccaggattattcaagaagtgctgccagcactcgaaaatgtgattgctgtgatggtggcggatttacagaggcgcaagtgtttaccaacaaggtctcatacccatgggggaaaccgccttactggtcgaaaatgtcgcgtgccgttcgcccaagcgactgggagagctggacacaggcgcgtgaggtggtgcgagttaagtgcaagccgtgtaacggaaaaggcgttatcagcaattcgtgtcgctgccatggcaaaggtaaggtgctggacaaggcagaaagcgatcgccagggcgttccagtaatgaaagcctgcgaccgctgcggtggtagaggttacgccaggcttaagttctcaacggtaattgagggcgttaatactgttgcggagataaagaaaacggcggcatatgagcaacttcagccgctatttgaggagttggtcgccgaatgccataaacaggagtctatggctgattccattctctcaaaagtaacgagatgaaaataattttccctaatgttgaaaatatataggaaataggtattgcatttcgcggaaaaactggatagattcatctctaacgctgggaatacgttcagtcgttccgaagccaaaaaaattcaagcccgaggttaacgccttgggctttttttatttctttgtggcctaaatcgcttcgagccaaaaaaacgcggagaacgacatcacccctctccgcaataacgactcaatctcatacccgcttgtctttcttttatccacaaagaggtaaagccataacttagtggaaatggtaacagctaaaaactatttgaaaagctaattattttttgcatcaactggctattcttaaggattgtttaattttttgctttcctagcgagaaagaagctccggaaactatcaatcaatacaaggctgccgttcggcggccttttttattcctagcaacagcactcgcacaaagcgaggtgagagtatgtatcgcatggacaaactaaccactggtgctgcctatggcgcttcagccgggagcatcctaaacggcatgttgaatgcctacagccccgagcagtggaacgctatcggcgtgctggtgggtatcatcattgccgtaatgacgtatctgacaaatctctatttcaaaatccgcgaagacaaccgccgcagcaggagccgagatgaacccaacgttgaggaataagctggtgggtgccattgttggcggatcaggggcaatcactattgctgcagtaatgctgggcaatgcggatggactcgaaggtcggcgttattacgcctatcaggatgtggtcggcgtctggaccgtttgcgatgggcacactggtaccgacattcgccgcggtcaccgatataccgacaaagagtgtgacaacctgcttaaggcagatctgcgaaaggtggcaagcgccatcgacccgctgatcaaggttcgcatccctgagccaacccgcgccgcgctttactccttcacctataacgttggctctggtgcttttgccagctcgacgctgctgaagaagctgaactccggtgatgttccgggtgcgtgtaaagaactgcagcgctggacttatgctggcggcaagcagtggaaggggctgatcacccggcgcgagattgagcgtgaagtctgcgagtggggccagaaatgagccgattaaccgcaatcatctgcgctgtcgttatctgcctgctggtttccatggcctgggccattaaccactaccgcgacaacgccatcacctacaaagaccagcgcgacaaagccaccaaaagtctccgcctggctaacgacaccatcaaagacatgcagacccgtcagcgtgatgtcgctgcactggatgccaaatacaccggagaactggctgatgcgaaagaaaccattgagcgtctgcatagcgatgtcattgctggccgtaagcggctgcaagtcgccgccacctgtgcaaagtcaacgaccggagccagcagcatgggcgatggagaaagcccaagacttacagcagatgctgaactcaattattaccgtctccgaagtggaatcgacaggataaccgcgcaggttaactacctgcaggaatacatcaggacgcaatgcctgaaataatttttttgcaaatcacaaagtcaatttaatgagcctcgcgatgcggggcttttttatgtccgcagtaaacgcgcatctcacgcgcatattaacgagagcctttcagtaagcgagcctgagaaatgccgttataggtggcgacctctctcgggcggcttttctgtgagacaggctcactttctaaaaggtaaagacgctatgaataatccgtcagttattccggccttcgacttccgcgaaatggtcacgaccctcgacaacaagataatcaccacatcactcaaggtggcggattactttggcaagcgacacaaagacgttttgcgtgccatacgtaacctgaaatgctccgatgacttcacccagcgcaattttgcgcccattgatttcattgataaaaatggcgatgttcagcctatgtataacatcacccgcgacggatgcatgatgctagtgatgggattcactggcaaaacagctgccgcagtgaaggagtgttacatcaatgccttcaactggatggccgagcagctaaaccggcgcatggcgatgggtgaagaattgcagcatcgctacgccatcaaagaaacgcgctcaaagctgaaaggcacgatcggaagccgtttgatgaacgagcggaagaaagagaagcgcgtcctggagctcgaacatgagcacatcatgcaggtaacgcagccagaattgttgattggctgatcgcggcattacagcaggcattcactgagtgcctgtgataatgcaacagcccgtacaaaacgggcttggatttatctctttgttgcgttcatggtcacatggtaaacgaattggctaaattggttatcccagcgcccattatgattagctgcaactaattgcattaacgcctgcattaacttgctgaacagcaagattaacttaagtctgttttttgaactgtcactatctaaggaaacttcttcggttaattgattctcggcgttaaaaatacccagttttgattcttccatgctgggttccgttggatgctgtttaaagtattcagtcagagtatccttcaggctctggatccttgaatcagcaatgctttgtattgatggattgtgtgcaaggtcattacgcattgagttgatggttttaagtgatttcataagttccggggggattcccaggtttcccgccatggatattttagtattacattcgattaaaagtttgtttttatctcttccaaagagatcttggcagtcacagcatgcgcatatccatgcttcgaccatgcgctcacaaagtaggtgaatgcgcaatgtagtacccacatcgtcatcgctttccactgctctcgcgaataaagatggaaaatcaatctcatggtaatagtccatgaaaatccttgtattcataaatcctccaggtagctatatgcaaattgaaacaaaagagatggtgatctttctaagagatgatggaatctcccttcagtatcccgatggtcaatgcgctggatatgggatagatgggaatatgctgatttttatgggacagagttgcgaactgttcccaactaaaatcattttgcacgatcagcgcactacgaactttacccacaaatagtcaggtaatgaatcctgatataaagacaggttgataaatcagtcttctacgcgcatcgcacgcgcacaccgtagaaagtctttcagttgtgagcctgggcaaaccgttaactttcggcggctttgctgtgcgacaggctcacgtctaaaaggaaataaatcatgggtcataaaattatcacgttgtccggcgcggcgacggatgttctgtatgcgctgtttttccgtggcgcgttgctgtctggtgatctgccttctaaatctggcacagccgaattgcgcgagcttggttttgctgaaaccagacacacagcaactgaataccagaaagaaaatcactttacctttctgacatcagaagggcagaaatttgccgttgaacacctggtcaatacgcgttttggtgagcagcaatattgcgcttcgatgacgcttggcgttgagattgatacctctgctgcacaaaaggcaatcgacgagctggaccagcgcattcgtgacaccgtctccttcgaacttattcgcaatggagtgtcattcatcaaggacgccgctatcgcaaatggtgctatccacgcagcggcaatcgaaacacctcagccggtgaccaatatctacaacatcagccttggtatccagcgtgatgagccagcgcagaacaaggtaaccgtcagtgccgataagttcaaagttaaacctggtgttgataccaacattgaaacgttgatcgaaaacgcgctgaaaaacgctgctgaatgtgcggcgctggatgtcacaaagcaaatggcagcagacaagaaagcgatggatgaactggcttcctatgtccgcacggccatcatgatggaatgtttccccggtggtgttatctggcagcagtgccgtcgatagtatgcaattgataattattatcatttgcgggtcctttccggcgatccgccttgttacggggcggcgacctcgcagattctcgctatttatgaaaattttcaggcatttgccgtttccgttcttcttctcgctaattcattgttttaactgtaaacaccccctgaaaagaaaggaaatgataagccttaaaaacggctaaatagccagagggcgtttcctttctctgtttttgtgtatggagtgagctatggaggtcaacaaaaagcgtctttctgaaatatttggggtcagcgtgcgaaccattcagaactggcaggatcagggaatgcctgtagcacgtggcggtggaaaaggtaatgaggtcctctatgaatcttccgcggctatcgaatggtattccgcacgcgacgcggcgattgagaatgagaaattacggaaggaggtggaagaccttcgtcttgcatcggaatccgaccttcagcctggtacgattgactatgagcgtcaccgcctcacccgagcgcaggcagatgcccaggaactaaaaaatgcaaaagattccgctgaggtggtggaaaccgcattctgcacgttcgtgctgtcgcggatggccggagaagtagccagcattcttgatggagttcctctgtcggttcagcggcgcttcccggagctggaaaaccgacatattgatttcctcaagaaggacatcattaaagccatgaacaaagcagctgcgctggatgaaataataccggggttgctgagtgaatatatcgaacagtcaggttaaggggctgcagcactctgcgcgcgcgggtctactttcgctgtaccgacctgagccgcaaacggcggttgaatgggcagacgataattactatctccccaaagagtcggcctaccaggaagggcgctgggaaacgttgccgtttcaacgcgcgatcatgaatgcgatgggtaacgattacatacgtgaggtcaacgttgttaagtctgcccgtgttggctattcaaaaatgttgctgggtgtttatgcgtattttattcagcacaagcagcgaaattcccttatctggctgcctactgatggtgacgccgaaaactttatgaagtcgcatgttgagccgacgattcgcgatattccgtcacttctggcgctggccccctggtatggaaaaaagcaccgggacaatacgctcagtatgaaacgcttctccaacggtcgcgggttctggtgtctgggtggtaaagcggcgaaaaactatcgtgagaaatcggtcgatgtcgccggttacgatgaactggcggcattcgatgaagatattgagaaagagggatccccgacgttcctgggtgataaacgtattgaggggtctgtctggcccaaatctattcgcggctcaacgccaaaaacaaaggggacctgccagattgagcgtgctgccagcgagtccgggcatttcatgcgttttcatgttgcctgtccgcactgtggtgaagagcagtaccttaaattcggcgacaaagagaccccgttcgggctgaaatggacaccgggcgaaccctccagcgtcttttacctgtgtgaacataatgcctgcgtcattaagcagcaggagctggatttcactgaagctcgttacatctgcgacaccaccgggatctggacgcgcgacggtttatcctggttttcatcaacaggcaccgaaatcgacccgccagacagcgtgacgtttcacatctggacggcatacagcccgtttaccacctgggttcagatcgttaaagactggctaaaaacgaaaggggatacaggaaagcgtaaaaccttcgtgaacaccactctgggcgaaacatgggagcctaaaattggtgaacggcctgacgcggagctcatggccgaacgcaaagagttcttcggggcatccgtaccggagcgtgttgcttatctgacagccgggatcgactcccaactggatcgatatgaaatgcgcgtctggggatgggggcccggtgaggaaagctggctgattgaccggcagatcattatgggccgtcatgatgatgaagcgaccctcgtcagggtggacgaggcgattaacaaaacctatctccgaaagaatggcgtggaaatgtcggtatcccgtatctgctgggatatcggcggtattgaccccaccatcgtctacaaccgctcaaaaaaacacggtctgtttcgtgtgatccctataaagggggcgtcggtttatggaaagccggtggcgaacatgccacgcaagcgtaacaagaatggtgtttacctcacagaggtaggaacagacaccgcaaaagagcagatttataaccgtttcacgctggtggcgcaaagagacgagccgctggcgggagcggttcatttcccgaataacccagaaatctacgatctaacagaggcccaacaactaacagctgaagagcaggtggaaaaatgggtagacggaaagaaaaagatcgtctgggacagcaaaaaacgacgaaatgaggcgctcgattgctttgtttatgcactggcggcgctgcgtataagcatatcccgctggcagcttaaccttgattcacttcttgccagcctgctggaggaagaaggcacccgtaacaataacaagaccctggcggattacgcgcgggcattgtctggagaggaataatggcaacacagactgaactggatgccgcgcgcgctgcgttacatgacctgatgatgggaaagcgcgtggcgacggtacagaaagacggtcgaagagtggaatttacagctacctcagtcaccgatctcaaaaagtatattgctgaccttgaatctcaggttggtaccacatcacgacgccaggggcctgcaaggttttacgtatgaaaataccatctttagtgggtcctgacgggaaaacatccctccgggaatacgcggggtatcatggcggcggcggagggtttggtggtcagttgcggggctggaatccaccaagcgaaagtgctgatgcggctcttctgcctaacttctcgcgcggaaatgcccgtgctgacgatctggtcagaaataatggctatgcggcaaacgccgtgcagctccaccaggaccacatcgtcgggtcatttttcagactcagctatcgaccgagctggcgctatcttggcatcaatgaggaggattcacgcgcattttcgcgggatgtagaagccgcctggaacgagtatgccgaggacgacttttgcgggattgatgccgagcgtaagcgaacgtttacgatgatgatccgagaaggtgtggccatgcacgcgtttaacggtgaattatgcacgcaggcgacctgggacagcgattcaacgcgtcttttccgtactcagttcaaaatggtcagtccgaagcgcgtcagcaatccgaataatatcggtgatacccggaactgtcgcgccggtgtgaaaataaatgatagcggtgctgcgctgggatattacgtcagcgacgatggttatcccggctggatggcgcagaactggacctacattcctcgcgaactacccggcggtcgaccttcatttatccatgtattcgaaccgatggaggatggacagacccgtggggccaatgcgttttacagcgtgatggagcagatgaaaatgctcgataccctgcaaaatacccagctccagagcgcgatagtgaaggctatgtatgccgctaccatcgagagtgaactggatacccaatcggcgatggactttattctcggcgcggataataaagagcagcagagcaaacttacgggctggctcggtgaaatggcgtcctattactcagctgcgcctgttcgcctgggtggggcaagggttccacacctgttgccgggtgattctctcaaccttcagtcggcgcaggataccgataacggctactcgacttttgaacagtccctgctgcgttatattgccgctgggcttggtgtgtcgtatgagcagctttcgcgaaactattcgcagatgagctactcgaccgcacgcgcaagtgctaacgagtcctgggcgtactttatggggcgtcgcaagtttgtggcatcccgacaggcctgtcagatgtttctttgctggcttgaagaggcgattgtccgccgcgtggtcacgcttccttcgaaagcccggttcagtttccaggaggcgagaacagcctgggggaatgccaactggattggctctggtcgaatggcaattgacgggctgaaagaggtacaggaggccgtcatgctcattgaggcaggtctcagcacgtatgaaaaagagtgcgccaaacgcggtgatgattatcaggagatttttgcccagcaggtccgggaaaccatggagcgtcgtgctgcgggtctgaaaccaccggcatgggccgctgcagcttttgaggccggagtgaaaaaatcaaacgaggaggagcaagatggcgcacgagctgcgtaatcttccgcatattgccagtatggcctttaatgagccgctgatgcttgaacccgcctatgcgcgggttttcttttgcgcgctggctggccagttgggcatcacccggctgacagataccgtctctggcatcacgcttgatgccggacaaatagccgaaccgctggcgctgtttggtgaggatgatgacatggatccccgtccatcacgcagctatcaggtggcaaatggtatcgcggtcttgccggtttccggcacgctggtcagtaaaacccgtgcgcttcagccttattccgggatgacgggttacaacgggatcattgctcgcctgcagcaggcaatcagtgaccccggcgttgacggcattcttctggatatggatacgccgggtggaatggtgtccggggcgtttgactgcgccgacattattgcccgtatgcgcgatatcaaacccatctgggcgctggccaatgacatgaactgcagtgcaggtcagcttattgccagttcggcatcgcgacggctggtcacacaaacggccagaaccggctccattggggtcatgatggcgcacagtaactatggcgctgcgctcaaaactaacggcgttgaggtcacgctgatttacagcggcgatcgcaaggtcgacggcaacccttacgaaaagcttccgaaagatgtgcgtgctgatttccagacgcgtatcgatgccactcgtcagatgtttgccgaaaaggtttccgcttataccggcatgtctgttcaggacgtgctggacaccgaagcggcagtattctccggccaggaatctttggataacgggctggcggatgaacttgttaacaataccgatgcgctcggcgtgatgcgcgaagcactcgacagacgcaaaaaaacaacccttggaggaactatgccatcaccttctgcatcagctgtgaccactaagccagttgaccaggcagcaactcagacaactgcatcagctgaacaggccactaccgttgacacgacaattgcttccgtagcagcccctgtagatgtcagtgcgcaggttactgcagcagtagctgcagagaatagtcgcatcatgggcatcctgaactgcgacgaggctaaagggcgtgagtcacaggcgcgagcactggccgaaacgccgggtatgacggtagagagcgcacagcgcattctggctgctgcaccgcaaagtgcccagatgcgtaccgatacggcgctggatcgtttgatggaaacagcacccggtgcactccaagcaggtagcgcatcttctgatgccgctgacgatttgttaaacacccccgtttaagaggctatcatggcaattactgaagttttcacacataaccagccgctcggtaacagcgacccggcgcacactgcgtatggtcctggcgaactgacggcttccactccagccatgacgccgctcatgctggatgccacttctggcaagctgaccgtctgggatggtgctcatgctggcgcggcaatgggcatcctggctgtaaccgcagaccagaacagcgcggaactggcatattacaaatctggctctttccgtattgaagatgtcctctggccatctgccgtcaccgacgacaacattaaacgtaacgcgttcgccggtactgcaatcagcatcgtttaatccgcatttctacaaccatcatcattcataaaagccgcttgcgcggctttttttacgggaaaaatctatgtccgtttacaccactgcccaactgctggcggtcaatgagaagaaattcaaattcgatccgcttttcctgcgtatctttttccgcgaaacctatcccttcagtacagagaaggtttacctgtcgcaaattcctggcctggtcaatatggcgctttacgtctcgccgattgtctccggcaaagtgatccgctcccgtggcggcagcacgtctgaattcacgccgggttatgtgaagccgaaacacgaagttaacccactgatgactctccgccgcctgccggatgaggatccgcagaatctcgctgacccggtctatcgccgtcgccgcattatccttcagaacatgaaggatgaagagctggcgattgctcaggtcgaagagaaacaggctgtttcggcggtgctcagcggtaaatacaccatgaccggggaagcgttcgagcctgttgaagtcgatatgggccgcagcgctggtaacaacattgtccaggccggtgcggctgcatggtcaacccgcgacaaagaaacgtatgacccgaccgatgacattgaagcctacgcgctcaacgccagcggtgtggtcaacatcattgtgttcgatccgaaaggctgggcgctgttccgttccttcaaggctgttgagaagaagctggatacgcgtcgtggttctaactctgagctggaaactgccgtgaaagacctgggtatggctgtttcatacaaggggatgtttggcgatgtggcaatcgtggtgtactccggccagtacgtcgaaaacgacgtcaaaaagaattatctgccggacctgacaatggtgctggggaatacccaggctcgtggcctgcgtacctatggctgcattcttgatgctgatgcccagcgcgaaggtatcaatgcctcgacacgctacccgaaaaactgggtgcagtcgggggatccggcgcgcgaatccaccatgattcagtcacaaattaaccgcaatattcgtcttgatcttgccgatgccattttgctcagcaaagctaaaaaagatctctcatttgccgagattgccgacggcaccggtctggcagaagcctttgtaaccgcggctttgctgggtcagcaggcgcttcctgccgacgccgcccgcctggtcggggcgaagctggatctcgacgaagactccattctactgttgcagatgattccactgcgtggctgcattgatgaccgtattccaactgacccaacgatgtatcgtttctatgaaatgttgcaggtgtacggtacaaccctgaaagcgttggttcatgagaaatttggcgatggcattattagcgcgattaacttcaaactcgacgttaagaaagtggcggacccggaaggtggcgaacgtgcggtcatcaccttagatggtaaatatctgccgaccaaaccgttctgacagccatgcgcaaccatcaaaagacgttcacgatgctgctggtactggtgctgattggtcttaatatgcgaccactgctcacctccgtcgggccactgctaccgcaattgcgccaggcgagcggaatgagctttagcgtggctgccctgttgaccgctctgccggtggttaccatgggcgggctggcgctggccggaagctggcttcatcagcatgtcagcgaacgtcgcagtgtcgccatcagtctgttgctgattgccgtcggtgcattgatgcgtgagctttacccgcaaagtgcgctgctgcttagcagcgcactgcttggtggggtggggatcggcatcattcaggcggtgatgccttcggtgattaaacggcggtttcagcagcgcacgccactggtgatggggctgtggtccgcggctctgatgggcggcggtgggcttggtgccgccataacgccctggttagttcaacatagcgaaacctggtatcaaacactcgcctggtgggcgctgcctgccgttgttgcgctctttgcctggtggtggcaaagcgcccgcgaggtcgcctcttcccacaagacaacaaccactccggttcgcgtggtattcactccccgcgcgtggacgctgggtgtttacttcggtctgattaacggcggttacgccagcctgattgcctggttacccgctttctatattgagattggtgccagcgcgcagtacagcggttccttactggcattgatgacgcttgggcaagccgcaggagctttgctgatgcctgctatggctcgccatcaggatcggcgcaaactgttaatgctggcgctggtgttacaactggtggggttctgcggctttatctggctgccgatgcaattgccggtattgtgggcgatggtgtgtgggttaggtctgggcggcgcgtttccgctctgtttgctgctggcgctcgatcactctgtgcaaccggctattgctggcaagctggtggcgtttatgcagggaatcggttttatcatcgccgggcttgccccgtggttttctggcgtgctgcgtagtatcagcggcaattacctgatggactgggcatttcatgcgctgtgcgtcgttgggctgatgatcataaccctgcgttttgcaccagtacgttttccgcagctgtgggtcaaagaggcatgatgcgacgcttgttcctgcgctttgttcatgccggatgcggctaatgtagatcgctgaacttgtaggcctgataagcgcagcgtatcaggcaatttttataatttaaactgacgattcaactttataatctttgaaataatagtgcttatcccggtcgtttatttcgcgaataacccgacaaggaacgccagccgccacgacgtttggtggaatgtcttttgtgacgatactacccgcgccaataacagaattatccccgatggtgacgcctggattaataaccacatgacttccgatccagacgttattgccaatcgttatcggaaaagagtacatctcgccgttttttctcaattcatggtgtacagggtgtcccgtaacggaaagagtaacgttgggtgcaatcagtacgttatcaccgattgttaccgtgtagtcatcgacaatggttaaattgaaatttgcataaaaattgcggcctatatggatgttggaaccgtaagagaaatagacaggcggttctacccaggcgttttcccctaccgtggcaaacatttctttaatcaggctttctcttttttcaacttctgatggatgcgagtgattaaactcatacattaacgttttcccacgaagtcttttttccggtaagccttcgcacatatcggtaaatagcttgcctgctcttattctttcggtcattggcatgttcaatgcgatcactccgttatgatatgttggtcggataaggcgctcgcgccgcatccgacattgattgcttaagcgacttcattcacctgacgacgcagcagggaaagcgggccggggccgctaagcgtgaacacggaaattaaggtgaagcccagcgccaccagacccagcaccagataagcgccctggaaaccgatgctttcatacatattgcccgccagtacagacataaaaatcatcgccagttgcttaaagaagcagaaacagaccagataaatcgtcgctgaaaaacgcacttcaaactggctggtaatatatttaaagcagcccaccagcaggaacggtacttcaaacatatgcagcgttttcagaataaccacttccagcgctgaggtggcgaacgatgagccaataatacgtacagacataatagtgccagccagcagcagggcgtttttcccaccgatgcgattaatgatcagtggcgcaaagaacataatcgaggcgttaagtaattcgcccattgtcgttacgtagccaaatacccgcgtaccctgttcaccggtagcaaagaacgaagtaaagaaattagcaaactgttggtcaaaaacatcgtaggtgcaggaaacgccaataacatacagtgacaaaaaccacagttttggctgtctgaacagttccagtgccagcttaaggctaaatgccgaatggttggcacctaccgcattggcaaccgtggcagaagagggcgcatccgttttggcgaaaaagagtaaaacggcgaggatgagtgcacagccagagcccagccagaaaacaaactgattattgatggtgaacatgatgccgacaatcgaggcacacagcgcccagccaacacagccaaacatccgcgcgcgaccaaattcgaaattactgcgacggctgactttctcaataaatgcctctactgctggcgcaccggcgttaaaacaaaagcctagataaataccaccaacaatcgatcctactaaaatgttgtattgtaacagtggcccgaagataaaaataaagaacggcgcaaacatcactaacatgccggtaataatccacagcaggtatttgcgcagcccgagtttgtcagaaagcagaccaaacagcggttggaataatagcgagaacagagaaatagcggcaaaaataatacccgtatcacttttgctgatatggttgatgtcatgtagccaaatcgggaaaaacgggaagtaggctcccatgataaaaaagtaaaagaaaaagaataaaccgaacatccaaaagtttgtgttttttaaatagtacataatggatttccttacgcgaaatacgggcagacatggcctgcccggttattattatttttgacaccagaccaactggtaatggtagcgaccggcgctcagctggaattccgccgatactgacgggctccaggagtcgtcgccaccaatccccatatggaaaccgtcgatattcagccatgtgccttcttccgcgtgcagcagatggcgatggctggtttccatcagttgctgttgactgtagcggctgatgttgaactggaagtcgccgcgccactggtgtgggccataattcaattcgcgcgtcccgcagcgcagaccgttttcgctcgggaagacgtacggggtatacatgtctgacaatggcagatcccagcggtcaaaacaggcggcagtaaggcggtcgggatagttttcttgcggccctaatccgagccagtttacccgctctgctacctgcgccagctggcagttcaggccaatccgcgccggatgcggtgtatcgctcgccacttcaacatcaacggtaatcgccatttgaccactaccatcaatccggtaggttttccggctgataaataaggttttcccctgatgctgccacgcgtgagcggtcgtaatcagcaccgcatcagcaagtgtatctgccgtgcactgcaacaacgctgcttcggcctggtaatggcccgccgccttccagcgttcgacccaggcgttagggtcaatgcgggtcgcttcacttacgccaatgtcgttatccagcggtgcacgggtgaactgatcgcgcagcggcgtcagcagttgttttttatcgccaatccacatctgtgaaagaaagcctgactggcggttaaattgccaacgcttattacccagctcgatgcaaaaatccatttcgctggtggtcagatgcgggatggcgtgggacgcggcggggagcgtcacactgaggttttccgccagacgccactgctgccaggcgctgatgtgcccggcttctgaccatgcggtcgcgttcggttgcactacgcgtactgtgagccagagttgcccggcgctctccggctgcggtagttcaggcagttcaatcaactgtttaccttgtggagcgacatccagaggcacttcaccgcttgccagcggcttaccatccagcgccaccatccagtgcaggagctcgttatcgctatgacggaacaggtattcgctggtcacttcgatggtttgcccggataaacggaactggaaaaactgctgctggtgttttgcttccgtcagcgctggatgcggcgtgcggtcggcaaagaccagaccgttcatacagaactggcgatcgttcggcgtatcgccaaaatcaccgccgtaagccgaccacgggttgccgttttcatcatatttaatcagcgactgatccacccagtcccagacgaagccgccctgtaaacggggatactgacgaaacgcctgccagtatttagcgaaaccgccaagactgttacccatcgcgtgggcgtattcgcaaaggatcagcgggcgcgtctctccaggtagcgaaagccattttttgatggaccatttcggcacagccgggaagggctggtcttcatccacgcgcgcgtacatcgggcaaataatatcggtggccgtggtgtcggctccgccgccttcatactgcaccgggcgggaaggatcgacagatttgatccagcgatacagcgcgtcgtgattagcgccgtggcctgattcattccccagcgaccagatgatcacactcgggtgattacgatcgcgctgcaccattcgcgttacgcgttcgctcatcgccggtagccagcgcggatcatcggtcagacgattcattggcaccatgccgtgggtttcaatattggcttcatccaccacatacaggccgtagcggtcgcacagcgtgtaccacagcggatggttcggataatgcgaacagcgcacggcgttaaagttgttctgcttcatcagcaggatatcctgcaccatcgtctgctcatccatgacctgaccatgcagaggatgatgctcgtgacggttaacgcctcgaatcagcaacggcttgccgttcagcagcagcagaccattttcaatccgcacctcgcggaaaccgacatcgcaggcttctgcttcaatcagcgtgccgtcggcggtgtgcagttcaaccaccgcacgatagagattcgggatttcggcgctccacagtttcgggttttcgacgttcagacgtagtgtgacgcgatcggcataaccaccacgctcatcgataatttcaccgccgaaaggcgcggtgccgctggcgacctgcgtttcaccctgccataaagaaactgttacccgtaggtagtcacgcaactcgccgcacatctgaacttcagcctccagtacagcgcggctgaaatcatcattaaagcgagtggcaacatggaaatcgctgatttgtgtagtcggtttatgcagcaacgagacgtcacggaaaatgccgctcatccgccacatatcctgatcttccagataactgccgtcactccagcgcagcaccatcaccgcgaggcggttttctccggcgcgtaaaaatgcgctcaggtcaaattcagacggcaaacgactgtcctggccgtaaccgacccagcgcccgttgcaccacagatgaaacgccgagttaacgccatcaaaaataattcgcgtctggccttcctgtagccagctttcatcaacattaaatgtgagcgagtaacaacccgtcggattctccgtgggaacaaacggcggattgaccgtaatgggataggtcacgttggtgtagatgggcgcatcgtaaccgtgcatctgccagtttgaggggacgacgacagtatcggcctcaggaagatcgcactccagccagctttccggcaccgcttctggtgccggaaaccaggcaaagcgccattcgccattcaggctgcgcaactgttgggaagggcgatcggtgcgggccacgacggccagtgaatccgtaatcatggtcatagctgtttcctgtgtgaaattgttatccgctcacaattccacacaacatacgagccggaagcataaagtgtaaagcctggggtgcctaatgagtgagctaactcacattaattgcgttgcgctcactgcccgctttccagtcgggaaacctgtcgtgccagctgcattaatgaatcggccaacgcgcggggagaggcggtttgcgtattgggcgccagggtggtttttcttttcaccagtgagacgggcaacagctgattgcccttcaccgcctggccctgagagagttgcagcaagcggtccacgctggtttgccccagcaggcgaaaatcctgtttgatggtggttaacggcgggatataacatgagctgtcttcggtatcgtcgtatcccactaccgagatatccgcaccaacgcgcagcccggactcggtaatggcgcgcattgcgcccagcgccatctgatcgttggcaaccagcatcgcagtgggaacgatgccctcattcagcatttgcatggtttgttgaaaaccggacatggcactccagtcgccttcccgttccgctatcggctgaatttgattgcgagtgagatatttatgccagccagccagacgcagacgcgccgagacagaacttaatgggcccgctaacagcgcgatttgctggtgacccaatgcgaccagatgctccacgcccagtcgcgtaccgtcttcatgggagaaaataatactgttgatgggtgtctggtcagagacatcaagaaataacgccggaacattagtgcaggcagcttccacagcaatggcatcctggtcatccagcggatagttaatgatcagcccactgacgcgttgcgcgagaagattgtgcaccgccgctttacaggcttcgacgccgcttcgttctaccatcgacaccaccacgctggcacccagttgatcggcgcgagatttaatcgccgcgacaatttgcgacggcgcgtgcagggccagactggaggtggcaacgccaatcagcaacgactgtttgcccgccagttgttgtgccacgcggttgggaatgtaattcagctccgccatcgccgcttccactttttcccgcgttttcgcagaaacgtggctggcctggttcaccacgcgggaaacggtctgataagagacaccggcatactctgcgacatcgtataacgttactggtttcacattcaccaccctgaattgactctcttccgggcgctatcatgccataccgcgaaaggttttgcgccattcgatggtgtcaacgtaaatgcatgccgcttcgccttccggccaccagaatagcctgcgattcaaccccttcttcgatctgttttgctacccgttgtagcgccggaagatgcttttccgctgcctgttcaatggtcattgcgctcgccatatacaccagattcagacagccaatcacccgttgttcactgcgcagcggtacggcgatagaggcgatcttctcctcctgatcccagccgcggtagttctgtccgtaaccctctttgcgcgcgcgcgccagaatggcttccagctttaacggttcccgtgccagttgatagtcatcaccggggcgggaggctaacatttcgattaattccttgcggtcttgttccgggcaaaaggccagccaggtcaggcccgaggcggttttcagaagcggcaaacgtcgcccgaccattgcccggtgaaaggataagcggctgaaacggtgagtggtttcgcgtaccaccattgcatcaacatccagcgtggacacatctgtcggccataccacttcgcgcaacagatcgcccagcagtggggccgccagtgcagaaatccactgttcgtcacgaaatccttcgcttaattgccgcactttgatggtcagtcgaaaactatcatcggaggggctacggcggacatatccctcttcctgcagcgtctccagcagtcgccgcacagtggtgcgatgcaggccgctgagttccgccagcagcccgacgctggcaccgccatcaagtttatttaacatatttaataacattagaccgcgggttaagccgcgcacggttttgtattccgtctgctcattgttctgcatattaattgacatttctatagttaaaacaacgtggtgcacctggtgcacattcgggcatgttttgattgtagccgaaaacacccttcctatactgagcgcacaataaaaaatcatttacatgtttttaacaaaataagttgcgctgtactgtgcgcgcaacgacattttgtccgagtcgtgaggtactgaaatggcaatacaacaccctgacatccagcctgctgttaaccatagcgttcaggtggcgatcgctggtgccggcccggttgggctgatgatggcgaactatctcggccagatgggcattgacgtgctggtggtggagaaactcgataagttgatcgactacccgcgtgcgattggtattgatgacgaggcgctgcgcaccatgcagtcggtcggcctggtcgatgatgttctgccgcacactacgccgtggcacgcgatgcgttttctcaccccgaaaggccgctgttttgctgatattcagccaatgaccgatgaatttggctggccgcgccgtaacgcctttattcagccgcaggtcgatgcggtgatgctggaaggggtgtcgcgttttccgaatgtgcgctgcttgttttcccgcgagctggaggccttcagtcagcaagatgacgaagtgaccttgcacctgaaaacggcagaagggcagcgggaaatagtcaaagcccagtggctggtagcctgtgacggtggagcaagttttgtccgtcgcactctgaatgtgccgtttgaaggtaaaactgcgccaaatcagtggattgtggtagatatcgccaacgatccgttaagtacgccgcatatctatttgtgttgcgatccggtgcgcccgtatgtttctgccgcgctgcctcatgcggtacgtcgctttgaatttatggtgatgccgggagaaaccgaagagcagctgcgtgagccgcaaaatatgcgcaagctgttaagcaaagtgctgcctaatccggacaatgttgaattgattcgccagcgtgtctacacccacaacgcgcgactggcgcaacgtttccgtattgatcgcgtactgctggcgggcgatgccgcgcacatcatgccggtatggcaggggcagggctataacagtggtatgcgcgacgcctttaacctcgcatggaaactggcgttggttatccaggggaaagcccgcgatgcgctgctcgatacctatcaacaagaacgtcgcgatcacgccaaagcgatgattgacctgtccgtgacggcgggcaacgtgctggctccgccgaaacgctggcagggtacgttacgtgacggcgtttcctggctgttgaattatctgccgccagtaaaacgctacttcctcgaaatgcgcttcaagccgatgccgcaatattacggcggtgcgctgatgcgtgagggcgaagcgaagcactctccggtcggcaagatgtttattcagccgaaagtcacgctggaaaacggcgacgtgacgctgctcgataacgcgatcggcgcgaacttcgcggtaattggctggggatgcaatccactgtgggggatgagcgacgagcaaatccagcagtggcgcgcgttgggcacacgcttcattcaggtggtgccggaagtgcaaattcataccgcacaggataaccacgacggcgtactacgcgtgggcgatacgcaaggtcgcctgcgtagctggttcgcgcaacacaatgcttcgctggtggtgatgcgcccggatcgctttgttgccgccaccgccattccgcaaaccctgggcaagaccctgaataaactggcgtcggtgatgacgctgacccgccctgatgccgacgtttctgtcgaaaaggtagcctgatatgcacgcttatcttcactgtctttcccactcgccgctggtggggtatgtcgacccggcgcaagaggtgctcgatgaggtcaatggcgtgattgccagcgcccgcgagcgtattgcggcattctcccctgaactggtggtgctgtttgcgccagatcactacaacggctttttctatgacgtgatgccaccgttctgtttaggcgttggagcgacggcaattggtgatttcggcagtgcggcaggagagctgcccgtgcctgtggagctggcggaggcctgtgcgcatgccgtcatgaagagcgggatcgatcttgccgtttcttactgtatgcaggtggaccacgggttcgcccagccgctggagttcctgctcggtgggctggataaggtgccagttctgcctgtgttcatcaacggtgtcgccacgccgctgcccggtttccagcgtacccgcatgttgggtgaagccattggacgtttcaccagcactctcaataaacgcgtgctgttcctgggttccggtgggctttcccatcagccgccggtgcccgaactggcgaaagccgatgcccatatgcgcgaccgtctgttggggagcgggaaagatttacccgccagtgagcgcgaattgcgtcagcaacgggtgattagcgccgctgagaagtttgttgaggatcagagaacgctgcatccgctcaacccgatttgggataaccagttcatgactttgctggagcagggacgcatacaggaactggatgccgtcagtaacgaagagctttccgccattgccggaaagtcgacacatgaaatcaaaacctgggtcgccgcttttgccgctatttctgcgtttggcaactggcgtagcgaagggcgttattaccgcccaatcccggagtggattgccggatttggctcgttaagcgccagaacagagaactgaatatgcaggagaagatgatgagttatcagccacaaaccgaagccgccaccagccgttttctgaatgtagaagaagcgggtaaaacgctgcgcatccattttaatgactgcggacaaggcgacgaaaccgttgtcctgctgcatggttccggcccgggtgctactggctgggcgaacttcagccgcaatatcgatccgctggtagaggcgggctatcgggtgatcctgctggattgtccgggttggggcaagagcgattcggtcgttaatagtggttcgcgatcggatcttaatgcacgaatcctgaaaagcgtggtggatcaactggatatcgccaaaatccacctgctgggcaactcgatggggggccatagttctgtggcgttcacccttaaatggccggagcgcgtcggcaaactggtgctgatgggcggcggtacgggcggcatgagtttgtttacgccgatgccaaccgaaggtattaagcgactgaatcagctttatcgtcagccgactatcgaaaacctgaagctgatgatggatatcttcgtttttgataccagcgatttgaccgacgccctgtttgaagcgcgcctgaataatatgctgtcgcgccgcgatcacctggaaaacttcgttaagagcctggaagctaatccgaaacagttcccggattttggcccacgtctggcggaaatcaaagcgcaaaccctgattgtctgggggcgcaacgaccgctttgtgccgatggatgcgggtctgcgtctgctgtccggcattgccggttctgaactgcatatcttccgcgactgtggtcactgggcgcagtgggaacatgccgacgctttcaatcaactggtgctgaatttcctcgcacgcccttaaggaatggtcatgacgaagcatactcttgagcaactggcggcggatttacgccgcgccgcagagcagggcgaagcgattgcaccgctgcgcgatctgattggtatcgataacgctgaagcggcttacgccattcagcacataaatgtgcaacatgacgttgcgcaggggcgtcgcgtggtagggcgtaaagtgggcctgacacatccgaaagtgcaacaacaactgggcgttgatggggtttgagggccaatggaacgaaaacgtacgtttatggtataacttattgattataatacagtatacaaaggtcccttttcagggaccctttcgtatgttgtagctgattttattttcttcttttcttttgggtgcttttaatagccatatatgatgtttcatataaagttaaaagtttccccatctgtctatctatagcgtcatgtttttcaggatttcttaatttctgcagcagtttagatatatatttcgcaggtaactttattattaatgaattatgggattgatacatttcctttgtccaatctaaatcttttcctgatttcaatacctcactctcatctctattaattataaaaccgagctttccatacggacctgttaaatatgattgtaattgtctatactcagatggacctaattcttcaaaatttttagcatcaaaaacaacttgtcttgttttatagtcctccaatactcgtttccaaaaatcagatttgccaccattggtgcctataatatctcgtctctgaactgcgttaccatttggatgggacttgatgtctgttaggtgggatgcaaatactattcttagtgcgtctaaacaccattgttcaaattcagtggcaccttcatttcctatcggtatctgatctagatgagtagttatttgacctattgttttatttctaatggctgaattatctgaaataatattaatatcatattcgtcatttatctcctctgcttcctctggagcaagtgcattacgatttagattcaaaccaagccagtaacatggatgaattaataatttctcattactttcaaaacctttatctggagttcgcccgtcatggcaaaatgaataggatgaggtgtttttatcacgaataccaacaaatcctacactatacaaactttggagaattccacttgcctttaacaactgtatttcagacgttattttaggatctccattttcttcgattaattcgaaagatgcttctattttttttaagcacgtataaactgttaattcaggttcaatgctacgaaatgcactagttataacctgtattgaaggaaagatcttctgatactctttccagagatcttcaagtctggccatggaaattgacttggctgcatattctaggtcagtgtttatgatagtttctctattctctctgaatgcggaaaaaaaagcttcattcaacaatgatagtaaatccctgggccggtaaagggtaaattgcaaacatcgcttaaaaccattcctccctttaagatcatccgctgtgcatctatcccaaactcgttgatctttctcaatatctagcttaaatgctactttcattcttttagctgacagcattaggagttgtgcccagtcccaatgcaaccttatgacttgaccctctatatttctcgagtaatcaggatcttcctttgatagcgacctaaatatattatcccttaaaaaaattattggacgaatgcattttgctttttgatttaattcaatagatgcatatgctagacctgcaatgattccaattcctatattatccggttcatacgcctcatctagcttatccattaatatgacaactttcctgtctgagcgttcaagaagtgatactatattattttctatttctgagatattcaaattgaattgaagatcaccaattgattcttctgggttattttcatctaaatactcctttgcgacaagcctacactttcttaaaatgtcaccttgtgcagaattccattttttcaaatgttcattcaacaatgtttctgatgatatttgagatgacaatttgtaatgagatgatatatatgatgctatctccattagcatagcgtatcgccataatagtcttgttgctgcccttgctaaattaaatgatcctgtaaatggtttcaacattgatctgaaaccaataatttgagaatcgtctggtgagaaactcaggattaatatttttttgtctttcttccaatgctcatttagctgaataaataaagcacttttacctgtccctcgtctaccaacaacaatggtcctgtcatcagtttcaattagagtcctaaagtcagcagtttcaatgaaagcattactcaacatctttttatcattttctgctgtcgtatcaccaaacggattagactttgaagtaatattcaattccatattcaaccttttatgttagttgctttcatttattactttatatactgttgaacgagcaatattcattgtttttgatatatgtgaggcacctaacccctgttgccacatatttaatactgcatctctatctatttttctttttctaccaaaaacaactccttttgccattgcctcttggcgaccttcattggtacgctctagtattctctgtcgttctgcctgggccactgcagatagaatagtgacaaccattttacccatctccccatcggtactgattccgtcatcaataaaccgaatggatacaccttgggcgtcaaactcttttattaactggatcatgtcagcagtatcgcgcccaaggcggtcaagtttcttcaccaagatgacgtcaccttcctccaccttcatcctcagcaagtccagccctttccgatcgcttgaactgcccgatgccttgtcagtaaagatgcgatttgctttcacgcctgcgtctttgagtgcccgaacctgaatatcgagagattgctggctggttgatacccgtgcgtaaccaaaaagtcgcataaaaatgtatcctaaatcaaatatcggacaagcagtgtctgttataacaaaaaatcgatttaatagacacattaacagcactgtttttatgtgtgcgataatttataatatttcggacggttgcaaaattgttaatgaataactgtcaggtagggagcctgatatgcctgtcgactttctaacctctgaccaaaaacagaattacggttgttatgctgcagaacctaatgacgtgcaactggcgcgctattttcatcttgatgaacgggatctggccttcattaaccaacgacggggcaaacataataggctgggcattgcgcttcagctcaccacagcccgttttctgggaacatttctgacggatttaactcaggttctgcctggtgttcaacattttgtcgcggtacagcttaatatccaccgtccagaagttctctcccgctatgctgaacgggacactacccttagagaacatactgcattaattaaggaatattacggctatcatgaatttggtgattttccatggtctttccgcctgaagcgtctgctatatacccgggcgtggctcagtaatgagcgaccgggtctgatgtttgattttgccactgcatggttgcttcaaaataaggtattactgcccggagcaaccacactagtacgtctcatcagtgaaattcgtgaaagggcaaatcagcggctgtggaaaaagctggccgcactgccgaacaaatggcaggcagctcaagtgatggagcttctggtcattccggaaggtcagcgtgtatcagcactggaacagttgaaaaaaggccctgttacagtcagtggacctgcgtttaatgaagcgctggaacgatatatccgattacgaagtcttgagttttcccgactgaacttttccggtctgcctgccattcaactgcgtaatctggctcgttatgctggcatggcgtcggtaaaatatatcgctcgaatgccacagcagagaaagcttgctgtacttactgcattcgttaaagcacaggaaataacggcattagacgatgccgttgatgtgcttgatatgctaattctggacattatccgcgaagcaaagaaaaccgggcaaaaaaaaagactcaggacactgaaagatcttgatcaggccgcattgttactggcgcgggcatgtgcattgttgctggatgataatacagatgtcccagatctcaggcaggttatcttcaagtgcgtacccaaaaacagactggcagaatctgtaagcaaggttaatgaacttgctcgtccacagaacaataatttccatgacgaaatggttgagcagtacggtcgggttaaacgttttcttccggcggtgttgcgggacctgcatttccgtgcggcaccggcaggtgaacatgtactggctgcgattcattatctggcagaactgaatggttcgaaaaagcgcatccttgatgatgcgcctgaacatattatcaccggtccctggaaacgcctcgtatacgatgcggagggacggatacagcgtgcaggttattcactatgtttgctggaacgccttcaggatgcactgcgccgccgggacatctggcttgaaaacagtgatcgctggggagatcctcgcgagaagttgttgcaaggtgaagagtggcagactcagcgtattcctgtctgtcgggcactgggacatcctgtcgatggacgtaaaggtgtgcaacaactggctattcagctggatgagacctggaaagccgtggcatcacgatttgaaaagaatgcggaagttcatatctgtaatgaaggtaaatatccatccctgactatcagttgtctggagaaacaggaagagccaccatcattgcttcgtctaaataatcggatcaaacagctactcccaccggtagatttaacggaactgttacttgagatagatgcccagacaggatttacacatgagtttgcgcatgtcagtgaatctggtgctcgagcgcaagatttgcacatcagtttatgtgcggtattgatggctgaagcctgtaatatcggactggaaccgctgataaagcacaatataccagcactgacccgccatcggctcagttgggtgaaacagaattaccttcgtgcagaaacgctggtcagcgccaatgcccgcctggttgattttcagtccacactggagcttgctggtcgttggggaggtggagaagtggcatcagctgacggcatgcgctttgtcacaccagtgaagaccatcaactcaggatctaacagaaaatattttggttctggacgaggcatcacctggtataacttcgtatctgatcagtactctgggttccatggcattgtggtacccggtacattacgggattcgatttttgtactggaaggacttcttgagcagcagacagggctgaatccagttgaaatcatgacagacactgcgggtagcagcgatattattttcggtctgttctggctactggggtatcagttttccccccggcttgccgatgcaggtgaggcggtgttctggcgggtgaataaatcggcaaactacggagtactggataagttggcccgaggatatgcagatctgtcaaaagcggagagtcagtgggatgagatgatgcgaaccgctggttcgctgaagttgggtacaattcatgcgtcagaactcattcgctctttactgaaaagctcgcgcccatcaggactggcacaggcaattatggaagtagggcgtgtaaacaaaacgctatatctcctcaattatattgatgatgaagattatcgtcggcggatcctgacgcagcttaatcgaggagaaggccgccacgctgtggctcgtgcgatttgttacggacaacgcggagagatcagaaagcgttatcgtgaagggcaggaagatcaactgggggcgctgggcctggttactaatgcagtggttctgtggaacacgctctatatggaggaagcgttgagctggatgcgccgtaatggcgaagaaattatagatgaagatatcgctcggctatctcccctgatgcacgggcatatcaatatgttgggccattatacattcacgttgccagaggatattttaaaaggggaactgagagctctaaatttaaatataaacaacgaattatctccttaacgtacgttttcgttccattggccctcaaaccccttttacaagtttgttgaatcccccgcggataagcggaccaaaaattgaggtcatagatgtggcaaaaacggtaatgccggaaataatgaccgaaatagtgaacaatcgtgctgattcagaaacagggacaatatcgccatagccgacggttgacatggtttctatcgaaaaatagaacgcggtcatcaaactttctattcgcggattaaaaccttcgcttaaataaagcgcaccgtaggttgagtaaaacagtaatgtcgtgaaactaataaatgcaaaaattgtcccggctgcggcgctactgtgggagaagtctttgcgcagtatcagcaaaaacaccagcgtaaaaatgcaaaatccaatactaaatttcagccagggataaaaatgcagggtgtaaattagcgctatcaacaacaaaatgatactgattgcccatgcgagctttgcccggaacagtaagccaatggagttcaggacaagaaagacgccgagcataaagagtggggcgtttgccagcaaggagagatccaactctgaaaatgctttgatatggaaaatatcaagcaaattgaccgacataccatagattgttttaaaaataagcaatccatttaaaaagacggccagcgcgagaatgtcgtgccgaagggtcacccataaatttgttgctgtttgtttgaatgtagcccagtgactcactgatacctctgtaaccacaattttgtttaattatcttagcgtgcacattttctgaacatacatgcagcgcgtgaatgtgttaaacaatagtagatgactttatccgcagtaatcaaaggatttgagcgagcaactgtacctcaggaaaggtcatttttcctgaatatgctcacatcatataaagaaatacagataaagttattatctgcttgtggtggtgaatgcactgaccggctataaggaaaggccaaacaagaacacggttgcaaaaaccgtgcccttaaatattgaatctctattcagaacactttcttaaatggtttcactgaaacgtgttcatagactcctgccgctacgtacgggtcagcatcggcccaggcctgagctgcttccagcgattcaaattcagcaataacggttgagccagtaaatcccgcagcccctggatcgttactgtctaccgctggcattggaccagctgtcaacaaacgaccttcatcgtgcagtaactgtaaacgtgctaaatgtgccggacgaacggaaaggcgtttttcgaggctatcagctttgtcttgagcgtaaataacatacaacacgggcacaactccttgttcgggaaagttgtaaagtacgttatttgaaagggcgaagatctgcaacggaaagatgatgtctttgttaaggccatgcataaagtaagggtaattacgccaaaaatgacattttcactgatcctgatcgtcttgccttattgaatatgattgctatttgcatttaaaatcgagacctggtttttctactgaaatgattatgacttcaatgacccttgatttacctcgccgcttcccctggccgacgttactttcggtctgcattcatggtgctgttgtggcgggtctgctctatacctcggtacatcaggttattgaactacctgcgcctgcgcagccgatttctgtcacgatggttacgcctgctgatctcgaaccgccacaagccgttcagccgccaccggagccggtggtagagccagaaccggaacctgagccgatccccgaaccgccaaaagaagcaccggtggtcattgaaaagccgaagccgaaacctaagccaaaaccgaagccggtgaaaaaggtacaggagcagccaaaacgcgatgtcaaacccgtagagtcgcgtccggcatcaccgtttgaaaatacggcaccggcacgcctgacatcaagtacagcaacggctgcaaccagcaagccggttaccagtgtggcttcaggaccacgcgcattaagccgtaatcagccgcagtatccggcacgagcacaggcattgcgcattgaagggcaggttaaagttaaatttgacgttacgccggatggtcgcgtggataacgtacaaatcctctcagccaagcctgcgaacatgtttgagcgtgaggtgaaaaatgcgatgcgcagatggcgttatgagccgggtaagccaggcagtgggattgtggtgaatatcctgtttaaaattaacggcaccaccgaaattcagtaagcagaaagtcaaaagcctccgaccggaggcttttgactattactcaacaggtaaggcgcgaggttttccttcaggatcaaccgcgacatacttaaataatgcttctgtcgctttatagcgttgcccaattggttcagacgctacttttttcacccacacttcaatattaatgctgaccgatgtcgtccctttctggacacagcgtgcatagcagcacaccacatcgccgaccgcaaccggccgtaagaaagtcattccttcaacccgcacagtcactacgcgaccgtgggcaatttcttttgccagaatagcgccgccaatatccatttgtgacattaaccaaccaccaaagatgtcaccattggcattggtatcggcgggcatggctaaagtacgtaaaacaagatcgccctgagggacgttatgtgttgtagacatggtaaaaccgacttaaaaggaaaatcacaggcgcgatgctactatgattttcctgaggagaacagaggagatacagcgccagccccgaaggactggcagtctggttaggatttatcttcctgcggcatgtggcggtagatatagataccgcttaacaatgtgaagattaaggtaagggcggtcaggccaaagactttaaagttgacccaaatattttgcggcagccagaatgcgatgtagatgtttgccagaccgcaaaggataaagaaaacagcccaggccagattcagcttcgaccataccggttgcggcagcgtgagttctttacccagcatccgctgaattagcggctttttcatcacccattggctgactaacagggctcccgcaaatagagcataaatgacagtaaccttccatttaataaactcatcattgtggaagaacagcgtcaagccaccgaagacgaccaccagaacaaaagtgatcagggccatcttctcaaccttacgaaagcgaacccagctatagataagcacaatcgccgtggcgacgatcagcgccgcagtagccgcatagatgtcataaatcttgtaaaacgcgaaaaagacaaccagcggtaaaaaatcaagaaactgcttcattttacgattccgtaatcaaatgcttaaggttattggcgaatcaacatatacaggcggaacagatagatgagcaatatggctgaaatcaggttgctcaaggtgttcgccagtacggcaccaatttccggggttaatgcggcaaaagaagaggcaaaaagcagcaacagtgtttttgccagcaaccagctcagtactgcgggtgccaccagacgcatattcgcccaagtcagccgcatactgctacgcatcgaggcaaaaacgcccattttgtcctgtaccaacatcaccggtgccagggccagtaaaatggccatgataattcccggaacgaccaccagcatgatgccaatctgtactaaaagggtagtcagaaaaatcagaataaataactttggcaatatcggcgcactggcaccaatagctcgcagcgcactgactctctgacccgcagacaccagctggataattaatattacgcctccggcgagaatggcgttaccgattaatcctgaaaaagtggacgccgctgaagcctgcagcaaaatttgttgctgttccggtgacatattctgaaccaggtcgaacaacccactactgccgctaacgggcacgccgtcattgagctgcgcaagctgtgcatcactgggtgagaaaacatgccctaacaccactgtgataaacgcacatagcaacgataccaacagaatggtcataaattgattacggaagaaatttccggtgtcacggtatacggactgcgccgtgatagacatgcactctccttgagttttatgcaggtgttaattagcgggcaattgtaccctggttaagcctcgggtggcagcatcaggtcttgtatggaaaagcatatctttgtaaagcggaggtaattgctggccttcaggcatgggcaaatcgcggcaagtggcgaccgagttaatatttgcgtagcgaaaatatttaaaaattgatttaaatcacattaaccaggattctcaatgcaacttctaaattaatccagatcaataaagggtgaattatcatatgtaatgtgatctatgtaggatcatttgttactccaatgtaggtatattcgtcacgtttttataaccataacgacggagcggatatgaaaaagttaacagtggcggctttggcagtaacaactcttctctctggcagtgcctttgcgcatgaagcaggcgaattttttatgcgtgcaggttctgcaaccgtacgtccaacagaaggtgctggtggtacgttaggaagtctgggtggattcagcgtgaccaataacacgcaactgggccttacgtttacttatatggcgaccgacaacattggtgtggaattactggcagcgacgccgttccgccataaaatcggcacccgggcgaccggcgatattgcaaccgttcatcatctgccaccaacactgatggcgcagtggtattttggtgatgccagcagcaaattccgtccttacgttggggcaggtattaactacaccaccttctttgataatggatttaacgatcatggcaaagaggcagggctttccgatctcagtctgaaagattcctggggagctgccgggcaggtgggggttgattatctgattaaccgtgactggttggttaacatgtcagtgtggtacatggatatcgataccaccgccaattataagctgggcggtgcacagcaacacgatagcgtacgcctcgatccgtgggtgtttatgttctcagcaggatatcgtttttaattccgcacaaaaacgaccccgtaatatacggggtcaataaggacatggtataaagggtattatttcttcgcttctacgccatcagtttcagagcgaattaaaaatttctcagttgtttgcggaatattctgaatcagccagtcggccatttgcttttcctcatttaaaatcgcttcgatggttggaattgaagctgtatcaccggcattttttgctgctgctaatagtgaggtgtaacaggcgatttcaaattgctcgaagacatatccgctaatagagcctttgactatttcatcagaagggaatataccaccgattgactgcccaagcgcagccattttactcatggaatctttaatgactgaacgtgaaatgtcattacgatcaagaatagtttccagttgaacaatctggtttttggtttcactaagatgttgttcaatacgagcgcgtagttcaggataattatctatacggctggccatggattcaagcatagattcggcttgcttttccattgcgtgggcgtcacgtaaccagtcatgataatgttcaatacgattcatgaaaatgtcctctttataaaatgactaaaagttaaaattcatatttcaggctttattttcggctttcttatttacgttattaatggccagatcagtcagtttgatgtcggtggccttttcttcttccagggtttctttcagaagcttcgctgctttacggtaacctaattgttcagccagcgtcgctaatgtcccgtaactggcaatctcataatgctcgactttctgtgctgcggcaatcagtgcggcatcacgcacttcgtttttctcggtactttcgatgacctcattagcttcttcaataagaccttccattgccacacatttcatgcgcttaattttcaggttcgattcggactccacaacttgatcaatacgttcaatctgtccatgagtttcctcgaggtgcgcatgaaaagcctgacttaatttttcatttgatgttgctcttgcgagttttgccagtgcccgggttaattgtttttctgcgctgtaggtatctgaaagcaggtgaataaatacatcttcaatggtcttcatattcatatttttctccagtgaaatcactgcgagccatacggcccgcagatgcaattatctttatcagctgatattaataattaacggtgaatcaggatttgcctgatttattaccaccgctttgttgaccgccttttttacccgcttcagatgcgcgttgcggatcatttttaaaattaccgccgctatgctgaccgcctttacggcctgcgtcggatgccttctcacggtcttcggcgaaatttcctgaaccaccacgatgttcggccatgttatttctcccgttgcgttgcattgtttcattaatatgagtgttgtgtgtcgacactcattaaaattagtcgctaatgagaattagtcaaattaagcgcaacgagaagatagagggaaaatatattttgaggaacattctggatatattaacaattacctgaggaataagtgacttagagaaaattattgattttactggtgttatgttgcgggattaatttgtttgattatattactgttgggcggaaaaatgacgtaagttgacgttcgaccggggtaagcgaaacggtaaaaagataaatattaaatgaatttaggatttttccggcttcattaaagaaagttaaaatgccgccagcggaactggcggctgtgggattaactgcgcgtcgccgctttcatcggttgtacaaaaactttcagtgccgccagcattttctctggctcattaatatgttgctcgatgattttaacaatggccgaaccagaaatcgcgcccgcagctcctgcatcaatcgctgcttttacctgatccggggcggaaataccaaatccctgcaatggaggtgcagcgttgtactctttcagcttcgcaaccagatgattgaggggtaacgcggcgcggttttctgcgccggtcacgcctgctcgtgacagcaaataggtgtaaccacgaccgtaagaggctatctggcgcagcaggtcgtcatcggcatttggcgggcagatgaagataggtgcgacattatgacgcaacgcggcctggcggaagggcgcggactcttcaactggcacatcggcaaccagcaccgaatcgacgccgactttttcgcactgggcataaaactcatcaatgcctttgttaaacaccagattggcatacatcaacaggccaatgggaatggtcgggtgtttctggcgaatcagtgccagcatttcaaaacattgtgccggagtcacacctgccgcaaaggcgcgcagagtggcgttttgaatcgtcgggccatccgccagtgggtcggagaaggggatacctaactccagcgcgtcagcaccggcttcaattagcgtatcgataattttcaatgactgctcaatgcccggatcaccgagcgtgacgaaaggaacgaatgcgccttctttgcgctccttcaactgggcaaacagagattcgtagcgttccatcagatttcccctcgtgctttcaaaatatcgtgaacggtgaagatgtctttatcgccgcgaccggaaaggttaaccaccagtagctgctctttatccgggttttcgcgcatcattttcaacgcatgggccagggcgtgggaggattccagcgccgggatgatcccttcgtgcaggcacagcgttttgaaggcttcaagggcttcatcatcggtaatagacacgtaatcagcgcgtccagtgctgttaagatacgcgtgttgtgggccgacagacgggaaatccagtccggcggagatggagtaagattcttcaatctgcccgtcttcggtttgcatcatcggcgctttcataccgaaatagatacccacgcgaccatgttttagcggtgcgccgtgctcgccagtttcgataccgtgaccacctggctccacaccaatcaggccgacgttggtttcattgatgaaatcagcaaacatgccgatggcattcgaaccgccgccaacacaggcgataacggcatccggcaggcgaccttctctttccagaatctgcgctttggtttcttcgccaatcatccgctgaaactcacgcacaatggtcggataaggatgcgggccagctgcggtgcccagcatatagtgcgcggtttcgtaactaccggaccagtcgcgcagcgcctcgttacaggcatctttcagcgtcgcggaaccgctatgcaccgggatcacttccgcacccattaagcgcatacgaaaaacgttaggcgactggcgttcaacgtctttggcacccatataaatacggcatttcaggccgagcagggcgctggcaagggccgacgccacgccatgctgaccggcaccggtttcggcgatgatttcggttttacccatccgcttcgccagcaacgcctgccccagcacctggttagttttatgcgcgccgccgtgcagcaaatcttcacgcttgagatacagcgtggtgttcgtcccggctgtaatgttctggcatttggtcagcgcggttggacgcccggcatagtttttcagcaggtcgttgaactgagcctgaaattcaggatctttttgcgcactgacaaaagcttcttccagctggcgcagagcaggcatcaggatttgtggcacgtacatgccgccaaactcaccaaaataggggttaagtaatgttgtcattgttcctttccttaatatgcgcgcagcgtctggaaaaccgaggccaaaagacgtgcgtctttgatgcccggttgcgactctacagcagaattaaaatcaagtccggcgcagccggtttgtgccgcttccacgcagttatctgcgcctaagccccccgccagcagaacgttgccaagcgattgaccatttaatagtgaccagtcaaaacgttgcccgcttccaccctggccgttgtctaaaacatatttatcaacgtgctgaaactcgcgggcgggcagggtttcaccgacgcttaatgctttccagatggcaacatgtgctggcagagcttcacgcagcgtatcgatatacagctgttcttcattaccatgcagttgcactgccgccagcgataacaccttagctttgtccaccacatcggcaatatcgtgattgcggaacacgccaacatactgcaacggtgccgcagccatcacttcctgcgcctgttcaacgttgacgcaacgcggtgatgtcgcaacaaaaatcaacccaccgtaaatcgcgcccgcgtcataagctgctttagcatcttgcccacgcgtcaggccacatactttattctcacccagcaacacccggcgcacggcggcgtgcaaatcgtcatgggccatcaacgccgaaccaatcagaaaaccgttagcgaagtggcttaactcgcgcacctgagcgtaagtattgatgccggattcgctgattaccgtcacgttgtgccccagtttcggcgcaagctcgcgggtacggttgagatcaatcgacaaatcacgcagatcgcggttgttgatgccaacgacctttgctcccaatgcaatggcgcgctcctgttcctcttcattactgacttcggtcagcacccccatctccagactgtgagcgacggcggcaagctggcgatattggtcgtcatccagtactgaaagcattaataagcaggcatcggcctggtaatagcgcgccagatagatctggtaagggtcgataatgaagtctttacataaaatcggctgcggggcgatttggctgacgatggggaggaaattaaagctcccctgaaaatatttctcatcagtcagcaccgaaattgccgaagcgtaatgtttataaatggcggcaatgcgtgctggatcgaaatcatcacggatcacgccttttgacggcgacgctttcttgcactccagaataaacgccgtgcgcgcaccctgtagcgcatcataaaaatgtcgcgtgctcggctgaacctcattctgaaaactggccagcggttgctgctgtttgcgggcttctacccaaatcgccttgtctgcgacgattttcgctaaaacggtttgcatcatttaccctcgtgccgccagtgcggtgactctgtcgtaagcggaaccactgcgcagtacctcaagaacggtttgcgcattggcttgcagatcttcatggccatgcaggcgcattaacatggcgacgttcgcagcgacggctgcttcatgggcggcgtcgcctttaccttgtaacaaacgtgttaaaatgtcacggttttcttccggtgttccgcctgccagttgctcctggtggtagggtgtcaggccaaagtcttctgcggtgagctgatagcttttaatttcgccgtcatgcagttcggcaacgattgtcggcgcgtgtaatgaaacttcatccatcccgccgctgtgcaccaccgccgcgcgttgataccccagcacgcgcaaggtttcggcaatcggcagcaccagttccggactataaacaccaattaacgccagcggcggatgcgccgggttaatcaatggccccagcacattgaacagggtgcgggttttcagttgctggcgaaccggcatcgcgtggcggaatccggtgtgatacttcggcgcaaagaggaaacatacacctaactcatccagcgcctggcgcgatttatcggcgttcatatcaagattaataccgaacgccgccagcagatcggacgaaccagatttactggagacgctacggttgccgtgtttcgccactttcagcccacaggccgcggcgacaaacgcactggcggtagaaatattgatactgttgctgccgtcaccgccagtaccgacgatatcagcaaacagataatccgggcgcgggaacggcgctgcgttttccagtagcgcggttgctgccccggcgatctcgttcgggtgctcaccgcgaattttcatgctcaccagcgccgccgccagttgttccggcttcagctcgccacgcaccaccgctgaaaacagctggtggctttcttgttggctaagcgtctgcgcctgatacagtttttccagaatcggttgcagcgtgttggctggctctagtttctgctgcgcccaggccagcgtttgttccagcaggcgagcgccctgggtggtgagaatggattccggatggaactggaatccacaaacgcgatccgcatcgtgacgtactgccatcaccatgccattaaaatgggcgttgatggttaaaccggccggaatgttactgccaaccagcgagtgataacgcgccaccggcagcgggtttgttaatccggcaaacatcgcctgaccgtcatgttcaatgctggaggctttaccgtggagaatttcgcccgcctgaccgacatagcccccgtaagcttcgacaatcgcctgatgtccgaggcaaatgccaataatgggcagcttgccacgcaagcgggtgaggagttccggcatacaaccggcttcgctcggcacaccggggccaggagaaagcatcagcaccggattgctcatggtcgccaggcgttcaattaaggtttgcgccggaatatggttgcggtaaatcaccacgttatgcccattgctgcgcaactgatctgccaggttgtacgtaaaagagtcgatattatcgagcagcagaatgtcagccatcagaaagtctcctgtgcatgatgcgcggtggcaatagcgcgcagtacagcgcgggctttgttacgggtttcgtcggcttccgactgcggaacagaatcaaggactacaccagcacccgcttgcacggtggcgataccgttttccaccagcgccgagcggatcacaatgcaggtgtcgagatcgccatgcgcggtgaaataacctaccgcgccgccgtagctgccgcggcgacgaccttccgcctcggcaattaactgcatagcgcgtactttcggcgcaccgcttaacgtccccatattcatacaggcgcgataagcgtgcagggcgtcaagatcgtgacgcagttcgccgactacgcgagagacgaggtgcatcacataggaataacggtcaactttggtgagatcggcgacgtagcggctgccgggggtgcaaatgcgtgccagatcattacgggcgagatcaaccagcatcagatgttcagacagctctttatgatcggtacgcatttccagttcaatacggctgtcgagatctctgtccagtgaaccatcggcgcgacgaccgcgtgggcgtgttccggcaatcgggtagatctcaatctggcggctggtggcatcatacttgagcgagctttccggcgacgcgccaaatagggtgaaatcattatcctgcataaaaaacatgtacgggctgggattactctttttcagcacgtaataggccgccagcggtgacgggcagggcagagagaaacggcgagatggcaccacctggaaaatttctccagcgcgaatcgctttttgcaacaaacgcactacgccaccgaactcttcatcgctctgattacattcacaacgcatatgcggcacggaaaccactggcagcggcggcgcggcttcggtcagttgctgacgtagttcgttcaggcgagcagtgagacgttgtttttcttcttcattcggagcaaacaggctggcctgaatacgggtgctttttttctgatggtcaatcaccatcagcgtttcagcgagataaaaacagaaatcagggcagttattttccgctgacagttgcggtaaatcttcaaatcccgccacaaggtcataagagaacaggccgccgaagaacatggcttctcgttcttccttcggtacattcaacagattctgcaataaacggaaagcgtcaaaaaccgaaagggagcataagcgggcgtcttcatccagcagtggactgacaggggggaagcgcagcacacggcagtttggtgattgttcactttccacacccgcaggcagggcgttatccagtagtgccaggagggcttcgccgttgccggaaagtgcctggattgtgacagtgtcacctaaagctgtaatgcgcagcgcactgtctaccagcagcaggctttttaaatcatctttgctgtcgatatctgcggattccagcagcagcgttgccggacgatccccacacaactggtgaaaaagcgcggtgggattgtcgcgataagcgccttcgcaggttagcagttcgagagtcggtttttgtgtttgcattgttattctctaattttgttcaaaaaaaagcccgctcattaggcgggctgggtatctgattgctttacgcatggtgaatacactgcccgtttcaggaagtgcgccaccaacctttcagtacgaaaattgctttcattgtcgataccctttttacgtgaacttgcgtactagttaactagttcgatgattaattgtcaacagctcatttcagaatatttgccagaaccgttatgatgtcggcgcaaaaaacattatccagaacgggagtgcgccttgagcgacacgaattatgcagtgatttacgacctgcacagccataccacagcttccgatggctgcctgacgccagaagcattggtgcaccgtgcagtcgagatgcgcgtcggcaccctggcgatcaccgaccatgacaccacagctgcaatcgcgccagcaagagaggaaatttcacgttcgggactggcgttgaatcttattcccggcgtggaaatttccacggtctgggaaaatcatgaaattcatattgtcgggctgaatattgatattactcatccgctaatgtgtgagttcctcgcgcagcagacagaacggcgcaatcagcgggcgcagctgattgccgaaagacttgaaaaagcgcaaatacctggggcgctggaaggcgcacaacgactggcgcagggcggcgcagtgacgcgcggtcattttgcgcgtttccttgttgagtgcggcaaagccagttcaatggcggatgtctttaaaaagtatctggcgcgcgggaaaaccggatacgttccgccacagtggtgtacaatagaacaagctattgatgtcattcatcattctggcggtaaggcggtgctagctcatcctgggcggtacaatcttagtgctaaatggctgaaaagattggttgcgcattttgccgaacaccacggtgacgcgatggaagtcgcgcagtgccagcaatcgcccaatgaacgtacccagctggcggcccttgcgcgtcagcatcatttatgggcatcacaaggatctgattttcatcagccatgcccgtggatcgaactgggtcgtaaactctggctgcccgcaggcgttgaaggcgtctggcagctatgggaacagccgcagaacaccacagagagggaattatgagccagtttttttatattcatcctgataacccacagcaacgtctgatcaaccaggcggtggagatcgtgcgtaaaggcggggtgattgtttatccaactgattccggctatgcgctcggctgtaaaattgaagataaaaacgcgatggagcgtatttgtcgtattcgccagctgccggacggtcacaactttaccctgatgtgtcgcgatctttctgaactctcgacctattcatttgttgataacgttgcgtttcgtttaatgaaaaacaacacgccgggcaactataccttcatcctgaaggggacgaaggaagtgccacgccgtctgttgcaggaaaaacgcaaaaccatcggtatgcgtgtgccttctaaccctatcgctcaggcgttacttgaagcattgggcgaaccgatgctttccacttcgctaatgctgccaggcagcgaatttaccgaatcggacccggaagaaattaaagatcgtctggaaaaacaggtagatttgattattcacggcggctatctcgggcagaaaccgacaacggttattgatcttaccgatgatacgccggtcgtggtgcgtgaaggcgtaggtgatgtgaagcctttcttataacaaattgcgttccacggatggaagactatggcagggaagtttcgctgcattttgctgttgatagcagggctgtttgtatcatctctaagttatgcagaaaacacggagatcccttcttatgaagaagggatctcgctctttgatgttgaagccactctgcaaccagatggggtgctcgacatcaaagaaaatattcattttcaggcgcgaaatcagcagattaagcacggcttttatcgtgatttaccacgactatggatgcagcctgatggggacgctgcactgctgaactatcatattgttggcgtcacccgtgatggtattcctgaaccctggcatcttgactggcatatcgggttaatgagtattgtcgtgggcgataaacaacgtttcttgcctcaaggcgactatcattatcaaattcattatcaggttaaaaatgctttcctgcgtgagggggattctgatctgctaatctggaacgtgaccggtaaccactggccgtttgaaatttataagacccgtttttctctccagttctctaatattgcgggtaatccatttagcgaaatcgatctttttaccggagaagagggcgacacatatcgtaatggccgcatccttgaggacggaagaattgaatcccgcgatccgttttatcgtgaagatttcacggtcctctaccgctggcctcacgctttacttagcaatgcctcggctccgcaaacgacgaatattttcagccatcttcttttaccctccacgtcatcgttgttaatttggtttccgtgtctgttcctggtttgtggatggttatatctctggaagcgcaggccgcaatttacgccggtagatgtgattgaaaccgatgtcattccgccagattacacgcccggcatgttacgtctcgatgcgaagctagtttacgacgataaaggtttttgtgccgatatcgtaaatctgattgtgaaaggaaaaattcatctggaagatcagtctgacaagaaccagcaaatcctgattcgtgttaatgaaggcgcgaccagaaataatgcggtattactgcccgcagagcagttattactggaagcgttatttcgtaaaggcgataaggtcgttcttacggggagacgcaacagagtcttacgcagggcatttttacggatgcagaaattttatctgccgcgtaaaaagtcttcgttttaccggtctgatacttttttgcaatggggtggactggcaatattggcggtcattctttacggtaacttgagtcctgtaggctgggcaggaatgagtctggtgggcgatatgtttattatgatctgctggattattccttttttattttgttcccttgagcttttgtttgcccgcgatgatgacaagccttgcgttaatcgtgtaatcatcactttgtttttaccactgatttgttcaggcgtggccttctattctctctacatcaatgtcggagatgtattcttttactggtatatgccagcgggttattttaccgctgtttgcctgaccggttatctcactggcatggggtatatttttctgccaaagtttacccaaactggacagcaacgttatgcccacggtgaagctatcgttaactatcttgcgcgtaaagaggcagcaacacacagtggacgtcggcggaaaggggaaacacggaaactggattacgcgttgctaggttgggctatatcggcaaatttggggagggaatgggcgttacgcattgccccttcgctttcttcggcgattcgcgctccagagattgcccgtaacggcgttttattctcattacagacgcacctaagttgcggggccaataccagtttgttggggcgaagttattccggtggtggtgctggcggcggcgcgggtggcggaggcggtggtggctggtaattaagctgatgttaatcgaaacaagctttaaccataaagatagtgtagtatgttgcgcctcaaagccaggccgataaacgtcgagtcgtttacttaaggcctgaagagttcaaacagactttactatcagtgagtcagatgtaagttctgactcactgttgcacaaaagcatatcagacgcctgggaaggcgacaccaaaaggaagctctatgagcgaaaagctacagaaagtgctggcgcgtgccggccacggttctcgccgtgaaatcgaatctattattgaagccggtcgtgtgagtgttgatggcaaaattgctaaactcggcgatcgtgttgaagttacccctggattgaaaatccgtatcgatggtcacctgatttcggtacgtgagtccgctgaacaaatttgtcgcgttctggcctattacaaaccggaaggtgagttgtgtacccgtaacgatccggaaggacgtccaacggtgtttgaccgtctgccaaaactgcgtggcgcacgctggattgccgtgggtcgcttggacgttaatacctgtggtctgctgctgttcaccaccgatggtgaactggcaaaccgtttaatgcacccaagccgtgaagttgaacgtgaatatgccgtgcgtgtatttggtcaggttgacgacgcgaaactgcgtgatttgagtcgtggcgtgcagttggaagatggtccggcagcttttaaaaccatcaagttcagcggcggcgaagggatcaaccagtggtacaacgtgactctgaccgaaggccgtaaccgtgaagttcgtcgtctgtgggaagcggttggtgtgcaggtgagccgcctgatccgtgttcgttacggtgatatcccactgccaaaaggtctgccacgcggtggctggacggagctggacctcgcccagactaactatctgcgcgaactggtggagctaccgccagaaaccagctctaaagtcgctgtagaaaaagaccgtcgtcgcatgaaggcgaatcagattcgtcgtgcggtgaaacgtcacagtcaggtgagcggcggtcgtcgttctggcggacgtaataataacggttaatcaaagtatgccggacgtcatatccggcatttttacagattaataatcgatccctatctgcgcttttacaccggcatcaaacgcatgtttgacggggcgtaattcacttaccgtatctgccagttcaagaatatcccgatgacaaccacgacccgtgataatcaccgtctgttgatgtggacgttcatttaacgcctgcaccacttcttccagtggcaaatagtcatacgccaccatatacgtcagttcatcaagcaaaaccatatccagtgaggaatcagcaagcatccgctttgcatgttgccagacttcgcggcaggcggcggtatcagactcgcggttttgtgtatcccaggtaaagcccgttgccatcacctgaaactcaacgccatgtggctccagcagattgcgttcgccattaggccaggtgcctttaataaactgcacgacgcctactttttttccgtgaccaactgcgcgtgttgccgtaccaaatgccgcggtggttttgccttttccattgccggtaaagacgatgataataccgcgttcatcctgggcctgggccacacgagcatctactttttctttcactcgctgctgacgctgttggtagcgttcatcactcattgggaaattcctggtttacggcccggttgggcgtcaaaggtcatgccggttttacggcggctgtcatcgcccatcagccagaggtagagcggcatgatatcagcgggtgttttaagtttctgtggatcttcggtcgggaaggcgctggcacgcattgcggtgcgcgtaccgcctgggttaatgcagttgacacgcaggcgctgctgatattcatcggccagtacctgcatcatcccttcggtggcaaatttcgacgctgcatatgcaccccagttggctcgtccctgacgtccaacgcttgatgaagtaaagaccagtgaaccggcgtccgatttgagtaataaaggaagcagtgcctgggtgagcataaaggtggcattaacgttgacctgcatgacgtcctgccagacctgcggattttgttcgctcattgggcaaacatcgccgagcaatccggcattatgcaaaacaccatccagacgcggataattaacggcaatgcgctgtgccagttgttggcaattttcggacgtgcaggtcagcaaatcgagaataaaccactgtggctgacgcccagtttcttcgtttatgtggctggctacctgacgtaatttttcttcattacggcccaacagaatcactgtcgcaccatagcgtgcatacgtcatcgcggcttcacgaccaataccatcgctggctcccgtcaccaggataatgcgatcattgagtaaatcttgttttggctggtaatgcatggctactcctcaacgacgttgtctgtcgcgctgccagtgtactttatgactttggggctttatgcctgaaacagaagggcatttcaatcagcctggggcgataacaccgcaaaatggatactttgtcatactttcgctgcaataacatctctgcgagacggcttaacatgcctgttgtaaactgtgagccaaagcgttgtttaaccaaggtggggactcgtggaattgttgtctgaatatggtttgtttttggcgaaaatcgttaccgttgtgctagcgattgcggcgattgccgccattattgtcaatgttgctcaacgtaataaacgccagcgtggcgagttacgggtcaacaatctcagcgaacagtataaggagatgaaagaagaactggccgcggcgctgatggactcacatcagcaaaaacagtggcacaaagcgcagaagaaaaagcataagcaagaagcgaaagcagcaaaagcgaaagccaaactgggcgaggtggcaactgacagtaaaccccgcgtctgggtgctggattttaaaggcagcatggacgcccatgaagtgaactcgctacgtgaagagataacggctgtactcgcagcattcaaaccgcaggatcaggttgtgctccgtctggaaagccctggtggcatggtgcatggttacgggctggcggcttcgcaactgcagcgtctgcgcgataaaaacattcctttaactgttacggtagacaaagtcgctgccagcggcggttacatgatggcctgtgtggcggacaaaattgtttccgcaccgtttgctattgtgggttccattggcgtggtggcgcaaatgcccaactttaaccgcttcctgaaaagcaaagatattgatatcgaactgcacactgccgggcagtataagcgcacgctgacgttgctgggtgaaaataccgaagaagggcgggagaaattccgcgaagagttgaacgaaacgcatcagttgtttaaagattttgtgaagcgtatgcgtccttctctggatattgaacaggtggcaacgggtgaacactggtacggacaacaggcggtagagaaaggcctggttgatgaaatcaacaccagtgatgaagttattcttagcctgatggaaggccgtgaagtggtcaatgtacgctatatgcagcgtaaacgactcattgaccgattcaccggcagcgcggcagagagcgccgatcgattgttgctacgctggtggcagcggggtcaaaagccattgatgtaaaagacaaacgcgaggctaagacctcgcgttttgctttaatcaaccagatgatatttttctgaaagcacatgggccaggtgtttgaacatattaaacaccgcggtgcttttggctgttggcaatccttgttcatctaaaaagtagtcgccggtaaataccagcacgccattacgctgcgtgacgccggtggcttcaatccctgcgagcgtatcctcatgctcacgaatgattttgttggcctctttcaacagcgtttcgcggtcgatgggttgtgtctctttgttcattatttactccttaaacaaggacattagtctacgccaggcatggcttgcagacaaatataccacgctggtggcaagagcgccttactggcaactttggattttgcatgctaataaagttgcgtatcggattttatcaggtacagtgtgacgctttcgtcaatctggcaatagatttgcttgacattcgaccaaaattccgtcgtgctatagcgcctgtaggccaagacctgttaactcagtcacctgaattttcgtgaacagagtcacgacaaggggttgatatccgcagagagcgagtccatatcggtaactcgttgccagtggaaggtttatcaacgtgcgacgcattcctggaagaatcaaattaggtaaggtgaatatgggtaaagctcttgtcatcgttgagtccccggcaaaagccaaaacgatcaacaagtatctgggtagtgactacgtggtgaaatccagcgtcggtcacatccgcgatttgccgaccagtggctcagctgccaaaaagagtgccgactctacctccaccaagacggctaaaaagcctaaaaaggatgaacgtggcgctctcgtcaaccgtatgggggttgacccgtggcacaattgggaggcgcactatgaagtgttgcctggtaaagagaaggtcgtctctgaactgaaacaactggctgaaaaagccgaccacatctatctcgcaaccgaccttgaccgcgaaggggaagccattgcatggcacctgcgggaagtgattgggggtgatgatgcgcgctatagccgagtggtgtttaacgaaattactaaaaacgcgatccgccaggcatttaacaaaccgggtgagctgaatattgatcgtgttaatgcccagcaggcgcgtcgctttatggaccgcgtggtggggtatatggtttcgccgctgctatggaaaaagatcgctcgtggcctgtctgccggtcgtgtgcagtcggtggcggttcgcctggtggtcgagcgtgagcgtgaaattaaagcgttcgtgccggaagagttctgggaagtcgatgccagcacgaccacgccatctggtgaagcgttggcgttacaggtgactcatcagaacgacaaaccgttccgtccggtcaacaaagaacaaactcaggctgcggtaagtctgctggaaaaagcgcgctacagcgtgctggaacgtgaagacaaaccgacaaccagtaaacctggcgctccttttattacctctacgctgcaacaagctgccagcacccgtcttggatttggtgtgaaaaaaaccatgatgatggcgcagcgtttgtatgaagcaggctatatcacttacatgcgtaccgactccactaacctgagtcaggacgcggtaaatatggttcgcggttatatcagcgataattttggtaagaaatatctgccggaaagtccgaatcagtacgccagcaaagaaaactcacaggaagcgcacgaagcgattcgtccttctgacgtcaatgtgatggcggaatcgctgaaggatatggaagcagatgcgcagaaactgtaccagttaatctggcgtcagttcgttgcctgccagatgaccccagcgaaatatgactccacgacgctgaccgttggtgcgggcgatttccgcctgaaagcacgcggtcgtattttgcgttttgatggctggacaaaagtgatgcctgcgttgcgtaaaggcgatgaagatcgcatcttaccagcagttaataaaggcgatgctctgacgctcgttgaacttacaccagcccagcactttaccaagccgccagcccgtttcagtgaagcatcgctggttaaagagctggaaaaacgcggtatcggtcgtccgtctacctatgcgtcgatcatttcgaccattcaggatcgtggctacgtgcgagtagaaaatcgtcgtttctatgcggaaaaaatgggcgaaatcgtcaccgatcgccttgaagaaaatttccgcgagttaatgaactacgactttaccgcgcagatggaaaacagcctcgaccaggtggcaaatcacgaagcagagtggaaagctgtactggatcacttcttctcggatttcacccagcagttagataaagctgaaaaagatccggaagagggtggtatgcgcccgaaccagatggttctgaccagcattgactgcccgacttgtggtcgcaaaatggggattcgcacagcgagcaccggggtattccttggctgttctggctatgcgctgccgccgaaagagcgttgcaaaaccaccattaacctggtgccggaaaacgaagtgctgaacgtgctggaaggcgaagatgctgaaaccaacgcgctgcgcgcaaaacgtcgttgcccgaaatgcggcacggcgatggacagctatctcatcgatccgaaacgtaagttgcatgtctgtggtaataacccaacctgcgacggttacgagatcgaagagggcgaattccgcattaaaggttatgacggcccgatcgttgagtgtgaaaaatgtggctctgaaatgcacctgaaaatggggcgtttcggtaaatacatggcctgcaccaacgaagagtgtaaaaacacacgtaagattttacgtaacggcgaagtggcaccaccgaaagaagatccggtgccattacctgagctgccgtgcgaaaaatcagatgcttatttcgtgctgcgtgacggtgctgccggtgtgttcctggctgccaacactttcccgaaatcgcgtgaaacgcgtgcgccactggtggaagagctttatcgcttccgcgaccgtctgccggaaaaactgcgttatctggccgatgcgccacagcaggatccggaaggtaataagaccatggttcgctttagccgtaaaaccaaacagcaatatgtctcttcggaaaaagacggaaaggcgactggctggtcagcattttatgttgatggcaaatgggttgaaggaaaaaaataacctttaattctgtcaggtttttataaacaaagggtcgcgaaagcggcccttttttattgcatattattttttcttcacacctatacactaaggctataaatgatatagtggttatagttagcaccttttttattattaaatcgtattagtcacccgccaggtgtgacgaaaaaacgatgttctgatggcgtctaagtggatggtttaacatgaaattacaacaacttcgctatattgttgaggtggtcaatcataacctgaatgtctcatcaacagcggaaggactttacacatcacaacccgggatcagtaaacaagtcagaatgctggaagacgagctaggcattcaaattttttcccgaagcggcaagcacctgacgcaggtaacgccagcagggcaagaaataattcgtatcgctcgcgaagtcctgtcgaaagtcgatgccataaaatcggttgccggagagcacacctggccggataaaggttcactgtatatcgccaccacgcatacccaggcacgctacgcattaccaaacgtcatcaaaggctttattgagcgttatcctcgcgtttctttgcatatgcaccagggctcgccgacacaaattgctgatgccgtctctaaaggcaatgctgatttcgctatcgccacagaagcgctgcatctgtatgaagatttagtgatgttaccgtgctaccactggaatcgggctattgtagtcactccggatcacccgctggcaggcaaaaaagccattaccattgaagaactggcgcaatatccgttggtgacatataccttcggctttaccggacgttcagaactggatactgcctttaatcgcgcagggttaacgccgcgtatcgttttcacggcaacggatgctgacgtcattaaaacttacgtccggttagggctgggggtaggggtcattgccagcatggcggtggatccggtcgccgatcccgaccttgtgcgtgttgatgctcacgatatcttcagccacagtacaaccaaaattggttttcgccgtagtactttcttgcgcagttatatgtatgatttcattcagcgttttgcaccgcatttaacgcgtgatgtcgttgatgcggctgtcgcattgcgctctaatgaagaaattgaggtcatgtttaaagatataaaactgccggaaaaataatttcttgcgttattttcggcaccttttatgtagcgaaggtgccggaatatattctcttttgttacttatttctataccgtgcacaatatttttatccctcatatttatagggtaaattacctgtaaagtagtgtctaattacccgcctcgcaaactccagttttcaaatatctatttcaggtcaaaagattgaattattcactggagacgattcgtaaattcgctggatttttgactaaagtttctttaggatttgtctcatcgtatgattaattacaccaatcgttcaacgtcttgctgataagtgatggcgattatatgaggttagcaatgccttctggaaatcaggaaccccgccgcgatcctgaattaaaacgtaaagcctggctggcggtttttcttggttctgcacttttctgggtggttgtcgcactgctgatttggaaagtgtggggataactatggtcggtcaggagcaactggagtcgtcaccattatgccagcatagtgacaatgaaacagaaacgaaacgggaatgttccgtcgttattccagacgactggcaactaacatcgcagcagcaagcctttatagaactgtttgctgaagatgatcagccgaaacaataattatcatcattcttattacccatttttaatgaattaaagggcttttaatacaccgcagcaataacagcttgagttatctcaacacaaaataataaccgttaagggtgtagcctatgatcaacacaaatatgaaatattggtcctggatgggcgcgttttctctgtcgatgctcttctgggccgaactcctctggatcattactcactgatccttgaccccgctgcggcggggttgtcatttgctttgccacaaggtttctcctcttttatcaatttgggttgttatcaaatcgttacgcgatgtttgtgttatctttaatattcaccctgaagagaatcagggcttcgcaaccctgtcattaaggaggagctatgtcgtcaaccctacgagaagccagtaaggacacgttgcaggccaaagataaaacttaccactactacagcctgccgcttgctgctaaatcactgggcgatatcacccgtctacccaagtcactcaaagttttgctcgaaaacctgctgcgctggcaggatggtaactcggttaccgaagaggatatccacgcgctggcaggatggctgaaaaatgcccatgctgaccgtgaaattgcctaccgcccggcaagggtgctgatgcaggactttaccggcgtacctgccgttgttgatctggcggcaatgcgcgaagcggttaaacgcctcggcggcgatactgcaaaggttaacccgctctcaccggtcgacctggtcattgaccactcggtgaccgtcgatcgttttggtgatgatgaggcatttgaagaaaacgtacgcctggaaatggagcgcaaccacgaacgttatgtgttcctgaaatggggaaagcaagcgttcagtcggtttagcgtcgtgccgccaggcacaggcatttgccatcaggttaacctcgaatatctcggcaaagcagtgtggagtgaattgcaggacggtgaatggattgcttatccggatacactcgttggtactgactcgcacaccaccatgatcaacggccttggcgtgctggggtggggcgttggtgggatcgaagcagaagccgcaatgttaggccagccggtttccatgcttatcccggatgtagtgggcttcaaacttaccggaaaattacgtgaaggtattaccgccacagacctggttctcactgttacccaaatgctgcgcaaacatggcgtggtggggaaattcgtcgaattttatggtgatggtctggattcactaccgttggcggatcgcgccaccattgccaatatgtcgccagaatatggtgccacctgtggcttcttcccaatcgatgctgtaaccctcgattacatgcgtttaagcgggcgcagcgaagatcaggtcgagttggtcgaaaaatatgccaaagcgcagggcatgtggcgtaacccgggcgatgaaccaatttttaccagtacgttagaactggatatgaatgacgttgaagcgagcctggcagggcctaaacgcccacaggatcgcgttgcactgcccgatgtaccaaaagcatttgccgccagtaacgaactggaagtgaatgccacgcataaagatcgccagccggtcgattatgttatgaacggacatcagtatcagttacctgatggcgctgtggtcattgctgcgataacctcgtgcaccaacacctctaacccaagtgtgctgatggccgcaggcttgctggcgaaaaaagccgtaactctgggcctcaagcggcaaccatgggtcaaagcgtcgctggcaccgggttcgaaagtcgtttctgattatctggcaaaagcgaaactgacaccgtatctcgacgaactggggtttaaccttgtgggatacggttgtaccacctgtattggtaactctgggccgctgcccgatcctatcgaaacggcaatcaaaaaaggcgatttaaccgtcggtgcggtgctgtccggcaaccgtaactttgaaggccgtatccatccgctggttaaaactaactggctggcctcgccgccgctggtggttgcctatgcgctggcgggaaatatgaatatcaacctggcttctgagcctatcggccatgatcgcaaaggcgatccggtttatctgaaagatatctggccatcggcacaagaaattgcccgtgcggtagaacaagtctccacagaaatgttccgcaaagagtacgcagaagtttttgaaggcacagcagagtggaagggaattaacgtcacacgatccgatacctacggttggcaggaggactcaacctatattcgcttatcgcctttctttgatgaaatgcaggcaacaccagcaccagtggaagatattcacggtgcgcggatcctcgcaatgctgggggattcagtcaccactgaccatatctctccggcgggcagtattaagcccgacagcccagcgggtcgatatctacaaggtcggggtgttgagcgaaaagactttaactcctacggttcgcggcgtggtaaccatgaagtgatgatgcgcggcaccttcgccaatattcgcatccgtaatgaaatggtgcctggcgttgaaggggggatgacgcggcatttacctgacagcgacgtagtctctatttatgatgctgcgatgcgctataagcaggagcaaacgccgctggcggtgattgccgggaaagagtatggatcaggctccagtcgtgactgggcggcaaaaggtccgcgtctgcttggtattcgtgtggtgattgccgaatcgtttgaacgaattcaccgttcgaatttaattggcatgggcatcctgccgctggaatttccgcaaggcgtaacgcgtaaaacgttagggctaaccggggaagagaagattgatattggcgatctgcaaaacctacaacccggcgcgacggttccggtgacgcttacgcgcgcggatggtagccaggaagtcgtaccctgccgttgtcgtatcgacaccgcgacggagttgacctactaccagaacgacggcattttgcattatgtcattcgtaatatgttgaagtaacaactatttgcttgccggttattttgcttccggcaagcaaatgaattacacaatgcaagagggttatttgttcagcaaatggcccattttctcggctttggtatcgagataatgttcgttattggggttacgacctacaatcaatggtacgcgttcaacaatattaatccctgcttcggtcagaatttcgacttttttcgggttattggttaacaagcggacttcattgacgccaaggagtttgaacatatcagcgcaaagagtgaagtcgcgctcatcagcggcgaagcctaactggtggttagcctctacggtatcgtaaccttgatcctgcagtgcgtaagcgcggattttattcagcagaccaatgttacgaccttcctgacggtgatacagcaaaataccacggccttcctcggcaatttgcgtcaatgccgcttcgagctggaagccacaatcgcagcgcaagctgaacagggcgtcaccggtcagacattcggaatggacgcgcgcaagtaccggggtatgcccggaaatatcgccatagactagcgcgacatgatcgtgtccggttgccagttcttcaaatcccaccatcaggaaatcgccccatggggttggcagtttggcttctgccacacgtttaagctgcatgaaattctccagataatgctggttctgtattggcttattttgccataacgagaaggggttcacctaatcacgacgcgtcgatcgttcacggaatggcacaaatctgtcaatttttcctggaactggcgttttcagttatgattgtgggacttatcaaaaaggagaggccatgcgttcgattgccagacgtaccgcagtgggagctgcactattgcttgtcatgccagtagccgtatggatttctggctggcgttggcaacctggagaacaaagttggctactaaaagcggctttttgggttactgaaactgtcacccagccctggggcgtcattacacatttgattttattcggctggtttctctggtgtctgcgttttcgcattaaggctgcctttgtattatttgccattctggcggccgcaatccttgtgggacaaggcgttaaatcctggatcaaagacaaagtccaggaaccacgaccttttgttatctggctggaaaaaacacatcatattccggttgatgagttctacactttaaagcgagcagaacgcggaaatctagtgaaagaacagttggctgaagagaaaaatatcccacaatatttgcgttcacactggcagaaagagacggggtttgcctttccttccggtcacacgatgtttgctgccagttgggcactgctggccgttggtttgctgtggccgcgtcggcgaacgttaaccattgctatcttgctggtctgggcaacgggagtcatgggaagccgcctgctgctcgggatgcattggccacgcgatctggtagtagctacgttgatttcgtgggcgctggtggcggtggcaacgtggcttgcgcaacgaatttgtgggccattaacaccacctgcggaagaaaatcgcgaaatagcgcaacgagaacaagaaagttaacgctggttgattttccgaatttagcccttaaatcatcaacaatgcgtgtggatgccatttcgcagacggcgcgaaaatggtactttaaagggctattgcggtaagttgaccataatttattcgctctaaccacataacgggaagtaatgtgaaatatttactcattttcttactggtgttagcgatcttcgtgatttcggtcacgttgggtgcgcagaacgatcaacaggtgacgtttaattatctgttagcgcaaggggagtaccgtatttccacattgctggcggtattgtttgctgcggggtttgctatcggttggttgatttgtggcctgttctggctgcgagttcgtgtttccctggcgcgcgctgaacgtaaaataaagcgactggaaaaccagctttcacccgcgactgacgtggctgtagtgccgcactcgtcagcggcgaaggaataactttctatgctggagttgttgtttctgcttttgcctgtagccgctgcctatggctggtatatgggccgcagaagtgcgcaacaaaacaagcaagatgaagccaaccgcttgtcgcgtgattacgtagcgggggttaacttcctgcttagtaatcaacaggataaagcggtagacctgtttctcgatatgcttaaagaggatacaggcaccgttgaagcccaccttacgctcggaaacctgttccgttcgcgtggcgaagttgatcgcgctattcgcatccatcagaccctaatggaaagcgcctcgctgacctatgaacagcgtctgttggcgattcaacaactggggcgtgattacatggccgccgggttatatgaccgcgcggaagacatgttcaatcagctgaccgatgaaactgacttccgcattggcgcgctgcaacagttgctacaaatctaccaggctaccagtgagtggcagaaagcaattgatgttgccgaacgcctggtgaagctgggtaaagataaacagcgcgtcgaaattgcccatttctactgtgagttagccctgcagcatatggccagcgacgatctcgatcgtgccatgaccttgctaaaaaaaggggcggcggcagataaaaacagcgcccgcgtatccataatgatgggacgcgtgtttatggcgaaaggagaatacgccaaagccgtcgaaagtctgcaacgcgtgatatcccaggacagagaactggtcagcgaaacgctggaaatgttgcaaacctgctatcagcagttgggtaaaactgccgaatgggcagaattcctgcagcgtgcggtggaagagaacaccggtgccgatgctgaattgatgcttgctgatatcatcgaagcgcgcgacggtagtgaggccgcacaggtctatattacgcgccagcttcagcgtcatccgaccatgcgtgtgttccataagttaatggattaccacttaaatgaagcggaagaagggcgtgccaaagagagcctgatggtgctgcgtgacatggttggcgagaaggtacgtagtaagcctcgttatcgttgccagaaatgtggttttaccgcatacaccctctactggcattgtccgtcttgtcgggcctggtcaaccattaaaccgattcgcggtcttgatggcctgtaatttttaaaaaaaatccgactttagttacaacatactaattattaatgttccattgtgctccggcaacgacggcgcagaaaaagcctgccaggggagaaatcgcaactgttaattttttatttccacgggtagaatgctcgccgtttacctgtttcgcgccacttccggtgcccatcatcaagaaggtctggtcatgacgttaactgcttcatcttcttcccgcgctgttacgaattctcctgtggttgttgcccttgattatcataatcgtgatgacgcgctggcctttgtcgacaagatcgacccacgcgattgtcgtctgaaggtcggcaaagagatgtttacattgtttgggccacagtttgtgcgcgaacttcaacagcgtggttttgatatctttcttgacctgaaattccacgatatccccaacactgcagcgcacgctgtcgctgctgcagctgacttaggcgtgtggatggtgaatgttcatgcctctggtggggcgcgtatgatgaccgcagcgcgtgaggcactggttccgtttggcaaagatgcaccgcttttgattgctgtgacagtgttgaccagcatggaagccagcgacctggtcgatcttggcatgacactgtcacctgcagattatgcagaacgtctggcggcactgacgcaaaaatgtggccttgatggtgtggtgtgttctgctcaggaagctgtgcgctttaaacaggtattcggtcaggagttcaaactggttacgccgggcattcgtccgcaggggagtgaagctggtgaccagcgccgcattatgacgccagaacaggcgttgtcggctggtgttgattatatggtgattggtcgcccggtaacgcaatcggtagatccagcgcagacgctgaaagcgatcaacgcctctttacagcggagtgcatgatgagtgattccaacagccgtctggtctactcaacggaaaccggacgtattgatgagcccaaagcggcccctgtacgccctaaaggcgacggtgtggtgcgtattcagcgtcagaccagtggacgtaaaggtaagggcgtttgcctgattaccggtgtcgatctcgatgatgccgaactgacaaaacttgcagcggaactgaagaaaaaatgcggctgcggcggagcagttaaagatggagttattgaaatccagggcgataagcgtgatttattaaaatcactacttgaagcgaaagggatgaaggtaaaactcgcaggcggttaacataaaaagccacggatatatccgtggctttcgaatattttactgtgcgtattattcagttatttcgtactgaacagaatcaagcgtattataattgcgagtcgataatcgacatttatttacgattatttaccgacctggtgaccaataacacctccgacagctgcaccacctaatgtacccaacgtactgccatcggtcagtactgcaccgcctaatgcccctgcacccgcgccgattgcggtgttgcggtcccgtttagaccagttagaacaggcactcagagacattgccaaagtaattgccagaacagccgcggtcatttttttgctcgttacaaacataatactctctcctgaatttatgattcacggaagtaagctctctataactataatagctaagaataagtctggtgaaattattccgtgaaatctgctcgcgcgcagggttatatcacgcaggtgataatgacttcctgttatatcgctgataataattttatatcttgagagtgttaataacaggtaaatagtcttaattatcaaccaggaatcatcttagagcggatgatttgccaaactgcaaatcatccgtagagaagggaaatggttaaatgtcaacgacgtgaatggtgagtttactgtgctcaagatgcatcagatcgctggcgcgtattttcgaatcggtaatcacgcgattgaatcgctcaacgggaccgatggagtatgaatgtacagcaccaaatttcgagctgtcagtcaggactatcgcttcgcactctttttccagcacggcattgaccacatcggtacgcatcatatcgcgaccggtaaatccagtttcaggttgccagccatcaataccaataaatgctttgctgaaatgcacctgttggatgcactggcgtgtcaaagggccaaccatactttcgctttttttctgatacacgccaccgagcaaaataacttcacaaggcgcgtctttcagcaaatgcgcgatgtagctgctgaccgtgatgatagtgacatttttcttctgctcgcccagagtccgggcgagtagggcattgctgctgccattttcgataaagatggtttcgcccggttgaaccagcgacgcggcaaactcggcgagttcacgcttcagcgtatagttgctcatcatacgggtttcgacgtcatcactatcaagcgaaacagcaaagccatgtgcacggcggaggtaactcagtttttcgagtgtgttgagatcctggcgaatggtaacttcagaaactccagtggcttttgccagatcggttacgctaacctgaccctggtcaatgaccatctgtagaatagtttgttgtcgggaattcatcgctgtaattcttataacgttataatacttaataaaaaaatactgacgcgccgggcatcctcaaataggaaaacctgaaggcacgattgttaaatctcccacggtgccttcgggatgtctggcgtagattcagcaacctggcgcaagagttctgctttaagtatctcgagattatggatcgcagagtggtaatcgcctgccacaaggatatctaacacaatatcaatacgttcggcaacgcgctgggcatcaaattcagacatcaaggacatccttatagcaaaagggggaaaatgaataatgcaaaaattgccgctaaaagagaagtgtttaacagcaacggctaattatcatccaggaatacgatatataatgacgggatatagcgctaagtatatatattcatctacttatgcgcgcttcagatagcgtttataccagcgttcgaaggcgacggcgggcatcggtttggcaaacaaaaatccttgccgctcattgatcccgttcttggttaaaaaagcatcttcctttgcactctctacaccttcggcgatcacctgaagattcaatgcctgggccacagcgacgatcgcccggaccagtgactgcgagacaggttgtttgtgaatatctcgaacaaaaacctggtcaagtttgatggcatcgatcggaaagcgcgccagttgcgaaagtgaagagtagccggtaccaaaatcatccagatgcacttgcgcacctagttggctaaattgttgaataacagacagtgccagttcatcattctcaatcagacaactctctgtcagttcaacatctatagggcagtattcaaaattgagttcctggagaacctgtttcagggcggtgaaaatggtttgatcggcgagctgacgtgcagaaatatttaccgccactcgcaggtttatgcctttatcccgccactttgccacctggcgtacgacatcgagaatcacccaacggcctaaaggcacaattagccctgactcttcggcgtaggaaatgaagtccaacggtggaatcaacccacgttcaggtgactgccaacgtactagtgcttccagactgcgcacttcgccacgccaggtgattttcggttgatagtgaataaccaactgatcgttttccagtgctttacgcaagttggtatccagccagagatattcaaatacccgttgattcatttctggggtaaaaacgcaaaattgtcctcgtccgccttccttcgctgtgtacattgctgtgtcggcgtgacgaataatagccgtgctgtctgaaccatgttcgggagagagtgcaatacctactgaacagctggtataaacttcaattaaaccaatgcgaaaggggagccgtaagcgggtcaaaattcgtgatgccattgcttccagcgcgctttgtgaggtgttggatgccagtaccagaaactcatccccacctggacgcgccaacacctggtcatgttcgagacagcttaaaatagccaatgacacgtcgcgtaataactggtcaccaaacaaatgcccataggcgtcgttgacctttttgaaattatccaaatcaagatacacaaccccaactttattgttatctgcatgattaatagcgtgatcgattaaatcctgcattgcgttacgattcggcagtccggtgatactgtcggtatttgccagaatacgcagtcgctcctgagcgcggcgctcttcggtaatgtcggtgccggaacagattaaaaaaatctcgtttttgccactgccgctgtggacaaatttattgcgaaacagaaacagccgctggcctttacatgttggtatccacagttcgacttcatatgcattgccgcttcgaaaaaatacacggttattgcgcctggatgccgcagcttcacgacggctcataaacagtttaaacacgctttgcccaatgacgtcgtgttctttcaaccctgtgtaatcttcacataaccgattgaagcgttggatattcccccggctgtcgagaatcactattgcggaatgtgcttcagaaactacctgctcagcaaaggaaagcccgtgtgataaatcacgagcaaccgccggtgtgtcatgccatgcagacgcgttgccagcccattcccgtttattgatttttcgtcctaccagatgcacagaaagatcgctttcatcgacggtcagactcatcatcaggctggaggtgatgaccgtcatttccctgatgcgagcagcctgttcggcagataactgcaatgtacgatcaggttctgtggtttcggtggtagaaaagcgcaaaacatcgctgctttccgtcaaccgccagtatggattgtgcgatccgagaaagttgtacaacgttgtggactccctaacggttttcatgatgcatatcctccggttaacagcggagtccgcggttaaataaaaggaacaacatgacttacatgaaattaacggcggctaaacgcattgttttttttatatatttatttgtaatccagttttggaaaaacgccagttttcaaacgaaagtcagttaaaaaatctgcctggatataacgaaggtagagcggggaaataaacggcccatccatgaggaatgggccgtgaaaggagattacgcgaccgggcgcgcaataatgctgcgggtttccatgcggacttcggcaatagtgacgtcaataacgtcagtcactttgtaaaccgtttcacctttaatttgtacagtgccgttttcctggctgcaaaccagttcatcgcgcacagcgtgtaagaaaggtgccggaataaaggcgatagcgccgttatcaaccaaacgaacacgcatgccgccacggctgatatcgacaatttccgctgcgaaacgggtgtcggtcccggctttgtctttcaggaagcgtgcgtataaccagtcaccaacatcacgttctgccatccggttgagacggcgacgctcggccatttggacagtgatttcatcctgtgggcgcgtcgcagtttcgcctttgataaccgctttcagcagacggtggttgatcatgtcgccatatttacggatcggcgaagtccaggtggcgtatgcttccagaccgaggccaaagtgaggaccgggttcagtgctaatttcagcaaatgactggaagcgacgaatgcggctgtcgaggaaaccagttggttgcgcgtccagttcacgacgcagtttgcagaaaccgtccagcgtgagcacttcttcggcatcgacatgcagaccgtgcgttttcagcaacgctgccagcgcgtcggcattcgccggatcaaagcccatatgcacgttatagatgccaaaaccgagcttatcgcgcagtacgcgggccgcacaaatgttagcggcaatcatcgcttcttcgacgatacggttggcaatgcgacgaggctcggcgacgatatccagcacttcacctttttcaccgagaataaagcggtaatccgggcgatctttaaacaccagtgcgtggttatgacgccactcgccgcggcgttggcaaatttgcgctagcaaacggacttgttcggcaattgcttcactttcaggctgccagtcaccggtattttccagccagtcagaaacctggtcatacaccagctttgctttggattcgatggtggcggcaaagaattcgatattatcttcaatggtgccatcagcggagagcgtcatgcggcatgccagtaccgggcggacttcattggcgcgcagtgagcagagatcgtcagaaagctcgcgaggcagcatagggatgttgaagccaggcagatagttggtgaatgcgcgaattttcgcggctttgtccagcttgctgccttcagcaatccacgcggttggatcggcaatcgccacaatcagctgaagtttgtcatccggcaacgccttagcgaaaagggcgtcatccatatcttctgtgctggcactgtcgatggtgacaaaatccagcgcggtcagatcttcacgaaccagaccttcatcgagcatttcggtagcgacgccgtctggtgcttctttttccagattatggcgtgcaagggtaacccaccacggtacaaagtgatcgtcaccaaaagtgatgtattgtgtcagttctgcatagaaagaacgatcgcctttcagcggatgacggcgcatttcggcaaccgcccagtcgccttctttaaactcgtggttcaggccacgggctgcgcggcaaggaatggcgtcttttaagagtggatgatcaggaacgatggccagacggtcatttttgccctgaaccttacccacgaaacgagtcaggaacggttcaaccagttcttctggctctgcggattcacgttctttttcactgtggatcaccgcgataattcggtcgccatgcatgacttttttcatctgcggcggcggaatgaaataacttttttgcgcgtcgacttccaggaagccaaagcctttttctgtggcttttaccaccccttcagcgcgtggcgtctgggaatgcagttgctgtttaagctgcgctagcagcgggttgtcctgaaacataattgtctattttggtggccattagagcggctgacagttttacgcgaatctgtctgacgcggcaaggttaatatgtctcacccaacgcgatttttaagcgatttatccagccacacagcccgctccataccagcagattaataatctgcgttgatgatttttcgtgttcgagtaaagggctgaactgggcggcgctaaagcgatcgggtgctcgggtcagccattgtatcgcctgaacggtagcgcgctcaacagaatgacggtcagcccattggttaatttcattttcgcccttgcgcataagggtgctgatttttttatattcatttgatgaatccatacaggtggcaaaacaagcaggactgccatttatacgcgcgcataacaacgccgcaagctgattatccggctgtgtattgccccgtgtgctgtttaacaacttttcgagaagggaaagtgaaatagggtggagagagagtatttcggccagttggcaaagttctgcagttgaactttttgtgtgctcttcaggtagtttttccacctcatagctgcttcgccagcgtaatgattcatcagcaaacagtgacgcgtcggcgtagttttgtatctccagcccgggtaaccagcgtaccggatgcccgagataagcctgaaatgtcgcaattgtccgcgcctgaaagccaataaaaccaatgatttggctaatgatcacacagtcccaggcagtaagaccgacgtcattcagatgctggcgcgatcggttgtcgataatagaaggcgagctagccagttggcgggcatattgcgtgatttgtgccaaccgatgattactttccctggtggaatcaggcccggggagcggcgtaagtcgcgccgaatagtagttacataaccgctggacgccgcaaacctgagcaaccgtcagggccgtcgacaagcgttcataagcggtgaaggtctgtgaacgggtcacggtaagctggtcagggaacaaatccactgcaagaacacgcgcagggtccagccatgaaaggaagggggccagcgtttctttttcaaggatcacgtcgagtagaaagggatcgctgacctttgcggcttccgggaccagaggcagaacgtcatactccgtagtactggattgcgtttcatgataccagtggcttttgccggtgatgtggcgttgttccatgggcgctccttggtcgtaaaggaaatcgttatcctgacgcaaggcgggaaggggagaaagacggatcggcgataacaaatatcagaaaggtataacagagataacgggcggcagaacgccgcccatctttaccaacagaacgattatttcagttcgagttcgttcattgcagcaatgctgaaaccgccgtcaacgtggaccacttcaccggagataccggcagagagatcggagcacaggaatgccgcagagttacccacatcttcaatagtaacggtacggcgaatcggggtaacggcttcgcaatgagccagcattttgcggaagtctttgataccggaggccgccagagtacggatcggaccagcagagatggcgttaacacgcacaccttccggacccatcgcgttcgccatatagcgcacgttcgcttccagagacgcttttgccagacccataacgttgtagttcgggatagcgcgctcagcgccaaggtaggaaagggtcagcagggcagaacccggattcagcatggagcggcaagcttttgccattgcaacgaagctgtaggagctgatgtcgtgggcaattttgaagccttcacgggtaacggcgttaacatagtcaccatccagctgatcgccaggtgcaaaaccaatagagtgtacgaaaccgtcaaatttcggccaaactttccccagttcagcgaacatggtgtcgatgctggcatcttctgcaacatcgcactgcagaacgatgtcagaacccaattgagcggcaaattcttctacgcggcctttcagtttgtcgttctggtaggtgaatgccagttcagctccttcgcggtgcatcgcctgagcgataccgtaggcgatggatagtttgctggcaacaccggttaccagaatgcgcttaccggaaagaaaacccatagctttaatccttattgttgatgcttgttgtgcctgaaaatcaggcgattcgtcgttttagtaaacagtacgaacagataaacggttattataatcaacctggctgtgagtagctatagttgccaggtccgaccggagcaggctgcggcagggggggcgcttttcccctcaccctaaccctctccccagaggggcgaggggaccgtattgtgcaaatattgttaccccagcaacaaacaggctcatacagcccctaaccctttcatggcgatggctgggacggttcagaccttgccgaatattctccagcaccgtctccatgttttcaccacaacagctattcggctcggtctgccccctcgctctttcagggagagggtgaccggcggttcagttcctgcagaatattctccagcaccgtctcctcattacaatcaatctcgttattccagaaacgcagcacggtccagccctgcgactcaagccagctagtgcgcctggaatcataggcaactgctaaatcatgctgcccaccatccagctcaacgactacacgcgccgagcagcaagcaaaatcgagaatgtagctccccactggatgttgacggcgaaatttgaaatcactaaaacgtcggctgcgaagatatcgccagagctttcgttcctgcaaagtgagattgcgtcttaaatcacgcgcatttgatttaattttatctatcacctcattctgacaagatttaatcttttgtcagaatgaggtgaataatctggaaggaggattcagaaaattagcgatctttacgccacgcatccgccgtcaatgcctcgccaaaatgaccggcaatcagccgtttggtgagttcatgcagcggcgatgccagcacatccgcggtgctgcctcgctcgacaacctcgccctgatgcatcaccagcacctggtcgctaatgtgcttcatcattccgatatgctgggtaacataaatatacgaaatgccctgtttttcctgtaattccagcatcagattaatcaactgcgaacgcatcgacatatccagtgaagcgagggcttcatcggcaataatgacttttgggcgcaatatcagcgcgcgcgccagacccagacgctgtttttgtccgggtgccaacatatgcggatagtaactgacgtgatccggtagcagcccaaccatacgcatcgtttcaataatctgtttgcgacgctgttccggttccaggtcggtgttcaggcgcagtggaaaatccagaatttgcgagatacgttgacggggattcaacgaggtcgaaggatcctgaaaaatcatgcgaatacgctgactgcggaaggaataatcgccaaaatgcagtggatgatcgtcaatcaataactcgccgctggtaggctctatcattcccgccagcatttttgccagcgtggatttacccgaaccattctcgccaataatcgccagtgtctggccttcacgtagcgtaaagctcaagggttttaccgcttctacggtctgacgacgaaaccagccggtccggtagcggaacgttttacttaaattacgcacttcaagcagcgtttcgatcatctcactctttctccatgttcagcgggaaatgacaggcatagagatgatttttcgcccccgtcaaacgtggcgtcacaatgcattctcgttgtgcatacgggcaacgtggccccagacgacaaccaatcggtaactgttccagcagtgggatagcgccgggcagcgtattgaggcgacttttatgcggcatcgcgctgccgaagtctggtatcgcgcggatcagcgcctgggtataaggatgatgtggcatcgtcaccaactccttactcggcgcggtttccactgtttgaccgcagtaaagcacgttaattttatccgcccattggctaagcatttgtaagtcatggctgataagcaaaatagtggtattgctgttttggttgagacgcgtcagcaggcgaaagatttgcgcctgggttgttggctccattgagttggtcggttcgtcagcaatcagcagacgcggttgattcgccagtgcaatggctatcatcactttctgacattcaccttcggtcaactcatagggaaaactgcgcatcgcatctttgtgatctttaatccccacgcggtgcagcagttcaatggcacggcgtttgcgccagccaaaacgctgccaccaacggcctttataggtccaggctgggatgttttgcatcaactggcggcccacacgttctgaagggtcaagacacgactgcggttcctggaaaatcatcgacacgttatggccaaccagtttgcgccgttcgcgtgcggagagacgcagcaaatcgatatcatcaaaacgcatacggtcagcagtaacacgccagttatctttattcaccccacaaatcgctttcgcaatcaaactcttgccggaaccggattcaccaacaagaccgcggatttcaccttcggttaaggtcatacttacccggtcgacggctttaacccactcatcaccggttttaaattcaatggtcaggttacgaatatcgagtaatggcattattccacccccgcaataatcgcacgacgaacgccatcgccaaggaggttaaccaacaacacgctaatcataattgccgcacctggcagcatgacagtccacggggcgacataaatcagttccagcgcatcaccgagcatcgctccccattcaggcgaggggagttgtgcgccgagatcgagaaagcccagcgcggcgatatcgagaattgccatcgacagtgcgcgggtgatctcggtgaccagcccggcggtgatgtttggcatcacagcaaaccagagaatattcagcgttgatgcgccatccagacgggcggcgataacgtactctttttccagttcgtcatgcaccatgctgtaaatcgaacgtaccatacgcggcagcaatgccagccagacagcaaacatagcgtgggacaaactcggtccggcaaacgctacaacgataattgccaacagcagcgaagggatcgccagtaaggtatccagaatatggttaagcaccgctgagcggaggccgtgtgtcgccccggcgaaggtgcccagtaccaggccacagatcgtcgcggcaagcgtcaccacaaatgcgccacccacggttggcgcagctccgctcagtaaacggcttaaaacatcgcgtccgaggtcgtcagtccccaggaagaaagaaacttcgccatagcgcgaccatgacggcggcaataattgataaccgagaaattgctggtcgatgccgtaaggcgcaaaccagccgccaaaaatacacagtacagccagccccgcgcagccgtacaggccgaccatcgcagaggcgtcactataaaatttgcgccaggcggtacgcagcgtgcccggcgggcgcttttcgctgtatacgctatcgtaaggcataccattccttatgtttcagagggttagccatggcacccaaaatatcagaaatcacgttaacaataatgaccagtgagccacacaccatcactccggcggaaatggctgcgtaatcctgctggcggatggcgttaattaaccagcgccctaaacccggccagctaaaaaccatttcggtgatcatcgccagcgtcagcatggtggaaaactgtaagcccaggcgaggaataaccggcggtaacgcgttatgcagaacgtggcgacgcaaaatagtaaagcgcgacaaaccgcgggtcgccgccgcttttacatagttctggtcatacacttcgatagtgctgatacgcatcaggcggatcacttcagttgttggcgcaaccgacagggtgatcacgggcaatatcatatggcggattgcgctcatgatcatttcatcccgccatggtgagtccgaaagccaggcatcaatcaacgcaaaaccggtaatcggtttcacttcgtagagcagatcgaaacgccctgaaacgggcaaccaacctagcgtgagtgaacaaaacagcgtcaacagaagcgccagccagaacaccgggattgaaaagcccagtaaggcgatggcgttgatcaagttatcctgccacttatggcgcgtaatcccggcaatcatccccacggggatgccaacaatcagcgcaaaaccgaaggcgaggatgcacagttccatcgtcgccgggaagacctcttttaactgttcggcaatcggttgaccgttaatgctggaaacaccaaaatcccagtggatcaggccgttaaaccagaacacccaggcattccacagtgacgcgccttgtaacggcgcatgaggggtgaaatagctcaagctgaagccaacgaaggtcagcaggaacaaggtgacaatcaataacaaaatgcggcgtaaggtgaagataatcatggttttttcacctcatcctgtttctcgcgatacaccccagcaaaggaggcgttaccaaacgggctaagtaccagacctttgatatcgtaccgataggcctgcaaacgcaatgacgacgccagcggcaaaatgggcaattcctgcgccagaatactctgcgcttcgtcataggcttcaatacgcgccgccagctgctgcgaagagagcgccttacgcaatacgctgtcgaatttcggatcgcaccagtgggcgaggttggtctgcgaatgaattgccgcgcagctcagtaacggacggaagaaactgtccgggtcgttactgtccgtcgcccaaccggataacgtcagatcatggctcatatccatcaaccgcgcctcctgaaagcgaccttctaccggcacaatcaccacttttacgccaacctgcgccatatccgcctgaatcagttcggcagttttcagtggactggggttccacgcctgcgaacgtgtgggcacccacagtttcagcgttaaattttccagccccaacgacttcaactgttcgcgcgatttcgccggattgtattcagtaattttagcctcgttgtcataggcccacgaggcgcgcggtaaaatagaggccgccgtttcagccgtaccataatagatggattgcatcaggcgctggttattaatcgccagtgccagcgcatggcggacagcgggattatttagcggcggtttggcggtgttaaatgccagataggcgacgttcatcccaggacgcagcgttaaacgcaagcgcgggtcgtcacgcaaaatggatagctggctggcagcaggccaggccagaacgtcgcattccccggtcaggagtttcgacagacgtccggtgccgccggagcctaaatccaccactacctgcggcattaacggtttaccgcgccagaagtcatcatgacgttgtaggcgaataaattgcccggcgcggtattccgacaactgatacggaccggtgccgaccggttgacggtcgagttgctcctggcgatcttctttctctaacttccgggcatattctgccgacatgaccgaagcataatgggttgcgaggtgccacaaaaaagaagcatccggctgggcgagtcggaactcaacggtatgattatccagtttgcggacgcttttcacgttatcggcaaattgcaggctgtcgaagtaggggaagttgctgccgttgacgttatgccacgggttgttgcggtcaaaaattcgctggaaggtaaacaccacatcgtcggcattcattttacgagtgggagtaaaccagtcggttttttgaaacggaacatcgcgacgcaggtggaagcgataggtcgcgccgttgtcgagtacttcccagctttcggcaagttccggcatcaggcgataggtatagggatcgacatccagcagtcgatcataaaactgggcggcaagggtatcgacaattaacccactgctcgctttggatgggttaaaggtgttgacttgcccgctgacgcaatagacaaaaccgctgtcgcggatatcagcatgcgggggagattcaggcgcggcgattgcctgaccactcacaagtccagcaatcaccaaaagagacgataatacctggcgcataatattaagggattttatgtaaagaggctatcttactaatatttaatgacatttgccattaccgtttgtgttcaggggtcgtaatgagggctgtgtggttggtcgttgaacaggtgacgtcgccatctgttcaacattcgtacccgtgatttctctataactataactcacagaacaacttagcgaggagcagagcggtacgatcgtgagaaacccattaaagcacgctgcagtgcgtgtcattgttagccagatgcggcgtgaacgctttatccggacaacgatactgaccgatcgtctgcaattaaatcattactcattaccccattgattcaaaaactctgcgatctcatcaatgcgtacgggattaatccccgcttcagcagccatttcatgttgggcttcttcgctgatctcttcattgttcatcaaacgggtgagcagtaactggaagtagtgggccagcggtgtgcgttcagcctctgcgacaggctctgcgcattcggtcgcgtactcatcggcaatatcaaaatattttagcgggatatcgtggttcattatttgcccctggggttaatgcgctaagcataagggcggatgatagcactcgtgatccgggtcatacatctttttatagttaatggcgcggcgcgttaccctcaggcaggataatgcgccgcgcatccgactattacgtttcactcaccggcgttctgtcaccatcatacaacggcactttgcgatagcggcggatcagataccataaatatgcgccgcctaacgaagcccataccagaccgagtgtcagtgacgttgactcgaggttaacccacagcacacccaccgtcagcgcgccaaccagcggcatcagcaaatagtggaagtgatccttccagcttttattcattcctttacgccgccagaaatgattaaacaccgacagattcacgaaggtaaacgccaccagagcaccgaagttaattaacgctgtggcggtaactaaatcgaagaacagcgccgacaacgcgacaatcccgaccataatgacgttgagtgccggagtccgccattttgggtgcacatagccaaacacgcgctccggaaacacattgtcacgccccatcacatacagcagacgcgacacgctggcatgtgaagccaggccagaggctaacgtgttcacaaacgtggtgcagaggaaaatcgactggaagagcttgccgccgacgtacagcgcaatttcaggcagtgcggcatccggatctttaaagcggctgatatcgggaaagaacagctgcataaagaacgacgccgcgataaagataacgccaccgtagaccgccgtcaggaagatggctttcgggatcacgcgtgcggcgtccggcgtctcttccgaaagcgtggtcaccgcatcgaaaccgaggaaggagaaacagacaatcgtcgccccggtaataatcgggatcaggtgcgcgttctcgctgataaacggctgaagtgaccagacggtgccaacgccttctcctttatgcagtccctgaactaccaggaagataaacaccaccatgatggagatttgcaccagtacaaacagggtattgaagttagcgaccaggttgacgctcttcagattcgcggcggttaaaatggcgacgaaggttaccacccacacccacggcggcacttccgggaagagggcggagagatagattttcgccaacaagacgttaatcatcggcaaaaagagacaatccagcagcgatgaccagccgaccataaatccgacgtgcgggttaatcgacttttgcgcgtaggtataggccgaaccggcctccggaaactggcgaaccagtttgccgtagctgatagcggtaaacagcacacccgccagcgccagcaaataggacgccggaacgtgaccgtcgctaatgccggagacaataccaaaagtatcaaatacggtcatcggcgtgagataggccagacccatcatcaccacctgccacaatttcagtgattttcgcagacgggttttgccgggttgcgcagcaatattcagtggtgaattaatagccataattgctgcctcccctgcgtaataaggtttgcggtcgtgtcgacctgaaatcaaacctgtttagcaagggaagcaaagggggcggagtccagtcagtagcaggaggggcgcatacgcagcctccctcgccatgcggggatttaatcatcggcatcatctcatttcctcgtcacagtcttaatcgttaacggaagcccgttgccgcccgcgctccataacgcgacatccgggaaatgtctggattaccagcaaatgtcaggcctggctccgctcaggccgatgaaacaaccccgcaaggggtattacgcgtttttcaacatccactcaatttctgtttctgtgatgaggcgctcaaactgcaacagctcatcatttttacaggcgtgatagacatggcagaagcgttcgcctaaatagcggcgcaggtgatcattctcgataaactcacccagggcatcgctctggcgaatcggaaagggtaagccttcctgttccagcccgttgccttcgacttcttcctgcaacggcagctcgttatcaaggccatgcaaaataccggcaaaaatcgctgccatcaccagatatgggttggcatcggcacccgccacgcgatattccacgcggtgattatgacggtcgccgcacggaatacgcagggcgacggtgcggttgttatggccccacgacgcctgcgtcggcacatacattcccggctggaagcggcgatacgagttcacgtttggtgccagcaacgccatcgacgacggcatcaggtcaatcatcccggcgagcatctttttcagcagcggcgaatcttcgccttccgcgtcagaaagcacgttctcgccacgattattttgcatactgatatggatatgcattccgctgcccgcgtgctcttcatacggcttcgccataaaagtggcgtgcatcttatgcttttctgccatcagacgcaccaggcgttttagtgccagcgcatcatcgcaggcttccagcacgttatcagtatggtaaaggttgatttcaaactgacccggcgaggcctcagcgaccgcgccatctgccggaatcagctgtaactgcgccagttcatcaatatcattgagcacgtcggcgaagtggttgaggttatcaacggagtaaacctggctttgtgtattgcggtcatcggtgccaggcgcgcagggcggttgcagatacccttcagcgtcgcgctggcgatccagtaaatagaactccagctctaccgctacgaccgggaacaatccgcgctggcgcagctgctgccacaggcggttaagaacgttccgcggctcaacgtcaaagggagcgccatcttcatcgaccatggtcaggagcatctgaccgataaactctggatcggcggcagaaggagttaaggaaccgagaacaggaacacaggtacgatccggctcgcccatttcctgacccagacctgcttcttctactacgttgcccagaatatccattgcaaataccgaggccgggaaataacaccctttctcgagcttcttcaggcttgaaacaggaatacgctttccacggaagcaaccatttaaatcggtaagtaaaacatcaacatattgcgtattcgggtagcgctccaggtagcgtttcacttcctgcgtaaaggcgctaccccgcctctcttctgactgctgaacaaagttctctacttcaacgatattggtttccatgattcttcgcctttggtttgttttccgctcgttatcaaagcgtaaaatataatgaccaccattcgaatctgtatgcaaactaaatgtttgtcaaatgttaaattgagtttgcaaaaatgaaaacccactgctagattgaaaaaatattgaacataaaggtcatttaaagcgcagtaatggcgataatttagtccactttgtgagattgagcatggaaaatataatgaacaatccggttatcggtgtcgtaatgtgcaggaacaggcttaagggtcatgcgacccagactctgcaagaaaagtacctgaatgccatcatccatgcaggcggcttgcctattgcgctaccacatgcgctggcggaaccgtcattacttgaacaacttttgccgaaactcgatggcatttatcttcctggtagtcccagcaatgtgcagccgcacctatatggtgaaaacggcgatgagcctgacgccgatcccgggcgtgatcttctgagcatggcgataattaatgccgcactcgaaaggcgcatccccattttcgccatctgccggggtttacaagaactggtggtggcaaccggtggttcgttgcatcgcaagctgtgcgaacagcctgaattgctggaacatcgggaagatcccgaactgccggtggaacagcaatatgcaccgtcgcatgaagttcaggttgaagaggggggattactgtctgcgttgttacctgaatgtagcaacttttgggtaaactctctacatggacaaggggcgaaggtcgttagcccacggttgcgtgttgaagctcgctcgccggatggcttagttgaggcggttagcgtcatcaatcatccttttgcgctgggcgtacagtggcacccggaatggaacagtagcgagtacgcgctttcgcgtatattgttcgagggctttatcaccgcttgtcagcaccatatcgctgaaaaacagcgactctgaccactacagtttaaggaaatgcaaatatgagtgatgagggactggcgccaggaaaacgcttgtcggaaatccgccagcagcaggggctttcacaacgtcgtgccgccgaactctccgggctgactcacagtgctatcagtacgatagaacaagataaagtcagccctgccatcagtacgctgcaaaagctgctgaaggtgtatggtctgtcactctcggaattcttttccgagccggaaaaacctgatgagccgcaggtcgtcattaatcaggacgacttaattgagatgggtagtcagggtgtgtcaatgaagctggttcataacggtaacccgaatcgcacgctggcgatgatctttgaaacgtaccagccgggcacaaccactggggaaagaattaagcatcagggtgaggaaataggcactgtactggaaggtgaaattgttctgacgattaatggtcaggattaccacctcgtcgcggggcaaagttatgccattaataccggcatcccgcacagtttcagtaatacgtcggcaggtatttgccgaattatcagcgcccatacgcccaccacgttttaatctttttgttctgtaagccgggtaagcgcaatgcgcccggcaatctatacacaaaatcattcaagttgcatcaaggcggcaagtgagcgaatcccgatgagcttactcaggtaagtgattcgggggagcgaacgcagccaaggcagaggcggcttgaaggatgaagtgtatataaagaatgtcgccagaaataaacgggcatacggcccggggatctctgcgccctgacgttcacaaactgcatatatctgatagacgtgaaacaggagtcataatgaattttcatcatctggcttactggcaggataaagcgttaagtctcgccattgaaaaccgcttatttattaacggtgaatatactgctgcggcggaaaatgaaacctttgaaaccgttgatccggtcacccaggcaccgctggcgaaaattgcccgcggcaagagcgtcgatatcgaccgtgcgatgagcgcagcacgcggcgtatttgaacgcggcgactggtcactctcttctccggctaaacgtaaagcggtactgaataaactcgccgatttaatggaagcccacgccgaagagctggcactgctggaaactctcgacaccggcaaaccgattcgtcacagtctgcgtgatgatattcccggcgcggcgcgcgccattcgctggtacgccgaagcgatcgacaaagtgtatggcgaagtggcgaccaccagtagccatgagctggcgatgatcgtgcgtgaaccggtcggcgtgattgccgccatcgtgccgtggaacttcccgctgttgctgacttgctggaaactcggcccggcgctggcggcgggaaacagcgtgattctaaaaccgtctgaaaaatcaccgctcagtgcgattcgtctcgcggggctggcgaaagaagcaggcttgccggatggtgtgttgaacgtggtgacgggttttggtcatgaagccgggcaggcgctgtcgcgtcataacgatatcgacgccattgcctttaccggttcaacccgtaccgggaaacagctgctgaaagatgcgggcgacagcaacatgaaacgcgtctggctggaagcgggcggcaaaagcgccaacatcgttttcgctgactgcccggatttgcaacaggcggcaagcgccaccgcagcaggcattttctacaaccagggacaggtgtgcatcgccggaacgcgcctgttgctggaagagagcatcgccgatgaattcttagccctgttaaaacagcaggcgcaaaactggcagccgggccatccacttgatcccgcaaccaccatgggcaccttaatcgactgcgcccacgccgactcggtccatagctttattcgggaaggcgaaagcaaagggcaactgttgttggatggccgtaacgccgggctggctgccgccatcggcccgaccatctttgtggatgtggacccgaatgcgtccttaagtcgcgaagagattttcggtccggtgctggtggtcacgcgtttcacatcagaagaacaggcgctacagcttgccaacgacagccagtacggccttggcgcggcggtatggacgcgcgacctctcccgcgcgcaccgcatgagccgacgcctgaaagccggttccgtcttcgtcaataactacaacgacggcgatatgaccgtgccgtttggcggctataagcagagcggcaacggtcgcgacaaatccctgcatgcccttgaaaaattcactgaactgaaaaccatctggataagcctggaggcctgaaatgaccgaacataccagcagttactacgccgccagtgcgaataaatatgcaccattcgacacgctgaatgagtcaatcacctgcgacgtttgcgtggttggcggcggctataccgggctctcctccgcgctgcatctggcggaagcgggctttgacgtagtggttctcgaagcctcacgcatcggctttggcgcaagcgggcgcaatggcggacagcttgtgaactcctacagccgcgacatcgacgtgatcgaaaaaagctacggcatggacaccgcccgtatgctcggcagcatgatgttcgaaggtggtgagatcatccgcgaacgtatcaaacgttatcagattgactgcgactaccgccccggcggcctgtttgtggcgatgaatgataaacagctcgccacacttgaagagcagaaagagaactgggaacgctacggcaataaacagctggaattgctggacgccaacgccattcgccgtgaagtagccagcgatcgctataccggtgcgctgctggatcacagcggtgggcatattcatccgctaaaccttgccattggcgaagcggacgccatccgcctcaacggcgggcgcgtgtatgaactttctgccgtgacgcagatccagcacaccacgccagccgttgtgcgaactgccaaaggtcaggtgacggcgaagtatgtgattgtcgccgggaatgcgtatctgggcgataaagtagagccggaactggcgaaacgcagcatgccgtgcggcacgcaggtgatcaccaccgaacggctgtcggaagatttagcccgttcgctgatcccgaaaaactactgtgtggaagactgtaactatctgcttgattactaccgtcttaccgccgacaaccgcctgctgtacggcggcggcgtggtctacggcgcgcgcgacccggatgacgttgagcgccttgtggtgccgaaactgctgaaaaccttcccgcagctgaagggcgtgaaaattgattaccgctggacgggcaacttcctgctgaccctgtcgcgtatgccgcagtttggtcgcctcgataccaacatctattacatgcagggctacagcggccacggcgtgacctgtactcatctagccggacgtttgattgccgaactgctgcgcggcgacgccgaacgtttcgatgccttcgccaatctgccgcattacccgttccccggcgggcgcacgctgcgtgtgccgtttaccgcgatgggcgcggcgtattacagcctgcgcgatcgtctgggcgtttaatttccgattaaccgtgaagagtcaaaaggtgtgaaacatgagcaacaatgaattccatcagcgtcgtctttctgccactccgcgcggggttggcgtgatgtgtaacttcttcgcccagtcggctgaaaacgccacgctgaaggatgttgagggcaacgagtacatcgatttcgccgcaggcattgcggtgctgaataccggacatcgccaccctgatctggtcgcggcggtggagcagcaactgcaacagtttacccacaccgcgtatcagattgtgccgtatgaaagctacgtcaccctggcggagaaaatcaacgcccttgccccggtgagcgggcaggccaaaaccgcgttcttcaccaccggtgcggaagcggtggaaaacgcggtgaaaattgctcgcgcccataccggacgccctggcgtgattgcgtttagcggcggctttcacggtcgtacgtatatgaccatggcgctgaccggaaaagttgcgccgtacaaaatcggcttcggcccgttccctggttcggtgtatcacgtaccttatccgtcagatttacacggcatttcaacacaggactccctcgacgccatcgaacgcttgtttaaatcagacatcgaagcgaagcaggtggcggcgattattttcgaaccggtgcagggcgagggcggtttcaacgttgcgccaaaagagctggttgccgctattcgccgcctgtgcgacgagcacggtattgtgatgattgctgatgaagtgcaaagcggctttgcgcgtaccggtaagctgtttgccatggatcattacgccgataagccggatttaatgacgatggcgaaaagcctcgcgggcgggatgccgctttcgggcgtggtcggtaacgcgaatattatggacgcacccgcgccgggcgggcttggcggcacctacgccggtaacccgctggcggtggctgccgcgcacgcggtgctcaacattatcgacaaagaatcactctgcgaacgcgcgaatcaactgggccagcgtctcaaaaacacgttgattgatgccaaagaaagcgttccggccattgctgcggtacgcggcctggggtcgatgattgcggtagagtttaacgatccgcaaacgggcgagccgtcagcggcgattgcacagaaaatccagcaacgcgcgctggcgcaggggctgctcctgctgacctgtggcgcatacggcaacgtgattcgcttcctgtatccgctgaccatcccggatgcgcaattcgatgcggcaatgaaaattttgcaggatgcgctgagcgattaatagcccaacgcaataatgtctgatgcgctgcgcttatcaggcctgcaaacgacgtattgattatgtatgccgaataaagcattcacgccgcatccggcaagttgtattgctcaacttcgctaaatctggtgctttttcaacaacgcgcggaactgatgataagttaaccccagtaattcagccgcgcgcttctggttatatttcccttgttgcaaactgagttgcagcaactctttttcctgctgcatctgaaactcacgtaaatccagcggcagtgttggaagcgaggtggtttctgaaacggcgatagcgtcttcaggcggacgccgtttaaagggatcaataatgatgtcatcaagcggataatcgctggtgccgtggcgatacactgaacgttccaccacgtttttcaattcacgaatatttcccggccaacgataattcagcaatgtttctctggcgcgctccgtaaaccccgggaacagaggcagcttgatttcccgacacatctggatggcaaagtattctgccatcaacattatgtcgctttcgcgctcgcgcagtggtggcagttgtacaacatcaaaagccagtcggtcgagcaggtcagcgcgaaaagtgccttcattgaccatcgccgggagatcggcattcgtcgcgcataccaaccgcacattcacctgcaatggttggctgccgccaacgcgctccagttcaccgtactcaatcacgcgcaataatttctcctgcaccatcatcggtgccgtagcgagttcatcaagaaatagcgtaccgccgtcggcacgttcaaatctccctggatgacgtttttgcgcaccggtaaacgcccccgcttcgtgaccaaacagttcggaatccagcagattttcatttaacgccgcgcagttaagggaaataaacggcccttgccaacgggaggagagataatgcaggcggctggcaatcagctctttaccggtgccgcgttcgccgatgatgagcaccggtttgtccagcggtgcgagatgcgaaacctgttccagcacttcgagaaagctgttcgcctcaccaagtaaattatctttgtattctgccatgatgaaattcgccacttgttagtgtaattcgctaactcatcctggcatgttgctgttgattcttcaatcagatctttataaatcaaaaagataaaaaattggcacgcaaattgtattaacagttcagcaggacaatcctgaacgcagaaatcaagaggacaacattatgggtattttttctcgctttgccgacatcgtgaatgccaacatcaacgctctgttagagaaagcggaagatccacagaaactggttcgtctgatgatccaggagatggaagatacactggttgaagtacgttctacttcggcgcgcgcgttggcagaaaagaaacagctgactcgccgtattgaacaagcgtcggcgcgtgaggttgaatggcaggaaaaagccgaactggcgctgctgaaagagagagaggatctggcacgtgcagcgttaattgaaaaacagaaactgaccgatctgattaagtccctggaacatgaagtgacgctggtggacgatacgctggcacgcatgaagaaagagattggcgagctggaaaacaaattgagcgaaacacgcgctcgccagcaggcattgatgttacgtcatcaggcggcaaactcgtcgcgcgatgtgcgtcgtcagctggacagtggcaaactggatgaagcaatggctcgtttcgaatctttcgaacgtcgtattgaccagatggaagcggaagcagaaagccacagcttcggtaaacaaaaatcgctggacgatcagtttgccgaactgaaagccgatgatgcaatcagcgaacaactggcacaattaaaagccaaaatgaagcaagacaatcaataataacatccaggcggcgtccgaacgcgccgccgctcatcgtctaaggagtacttatgagcgcgctatttctggctattccgttaaccatttttgtgctgtttgttttaccgatctggttatggctgcattacagcaatcgttctggtcgcagtgaattgtcgcaaagtgagcagcagcgattagcgcaactggctgatgaagcaaaacggatgcgcgaacgtattcaggcgctggaatctattcttgatgcagaacatccgaactggagggatcgctaatggcgggcattaatctcaataaaaaattatggcgtattccacagcagggcatggtccgcggcgtctgcgccgggattgccaactattttgatgtaccggtaaaactggtgcgtatcctggtggtgctgtcgattttcttcggtctggcgctgtttaccctggttgcttacatcattttgtcatttgcgcttgatccaatgccggacaacatggcctttggtgagcagctaccttccagcagcgaattgctggatgaagtcgaccgtgaactggcggcaagtgaaacgcgtttacgcgagatggaacgttatgtcacttccgatactttcacgttacgtagccgtttccgtcaactgtgaggaaagttatgaatactcgctggcaacaggccgggcaaaaggtaaagcctggtttcaaattagcaggcaagctggtacttcttaccgcactgcgctatggcccggcgggtgtggcgggctgggcgataaaatcagttgctcgccgaccgctgaaaatgttgctggctgtggcgctggaaccgctgttaagtcgggctgctaataaactggcacagcgttataaaaggtgaggggagtttcgcaaaaattgttaaatctcaggcgtataatggatggcaattttcatccatagaaggacgcttacatgtttaaaaaaggcttacttgctctggcactggtgttttcactgcccgttttcgccgctgaacactggatcgatgttcgtgttccagagcagtatcagcaagagcacgttcagggggccatcaatattcccctgaaggaagtgaaagagcgcattgccaccgccgttccggataaaaacgacaccgtgaaagtgtattgcaatgccggacgccagtcagggcaagcaaaagagatccttagcgagatgggatatacccacgttgagaacgccggtggcctgaaagacatcgcaatgccgaaggtcaaaggttaaaagaattcaccatgagcggcgcttatgcgccgtttttttttctgtcacaccttatttacatccccatagattatttgcgtcagctcacaaatacgctttttccctggtaaaaaatgatttcctgcgtgactaaaacccttgtgctcaattgacagtttattttctgcggagtagtctctcgtttcatgggaccgctaccacggaaaggcaacatgaaacagaaaattacggattacctggacgaaatctacggtggaacatttaccgcaactcatttacagaaacttgtaacgcgtcttgagagtgcgaaacgattaattacacagcgacgtaaaaaacactgggatgaaagtgatgtcgtgttaattacctatgccgatcaatttcacagcaatgatttaaaaccattacccacatttaatcagttttaccatcaatggctgcaaagcattttttcacatgttcatttgttgccgttttatccatggtcatctgatgatggcttttcggtaattgattatcatcaggtcgccagtgaagcgggggagtggcaggatattcagcaactcggtgaatgcagtcatttaatgtttgattttgtctgcaaccatatgtcggcaaaaagtgaatggtttaaaaactatttacaacagcatccaggttttgaagatttttttattgccgttgacccgcaaaccgatctcagcgccgtcactcgcccgcgtgcgttaccgttattaacgccattccagatgcgcgatcattcaacgcgccatttatggaccacctttagtgacgatcaaattgacctgaattaccgtagccctgaagtgttgctggcgatggtggatgttttactctgttaccttgcgaaaggtgctgagtatgtccgcctggatgccgttggctttatgtggaaagagccgggaacaagctgcatccatctggaaaaaacacatctgattatcaaactgttacggtcgattattgataacgttgcgccaggtacagtgatcattaccgagaccaatgttccgcataaagacaacattgcttactttggcgcaggcgatgacgaagcacatatggtgtaccagttctcgctgccgccactggtgctgcatgcggtgcaaaaacagaacgttgaggcgctttgtgcgtgggcgcaaaacctgacactaccttccagcaacaccacctggtttaacttcctcgcctctcacgatggcatcgggctaaacccgctacggggcttgttgcctgaaagcgaaatattagagctggtcgaggcgttacagcaggaaggtgcattagtaaactggaaaaataatcccgacggtacacgcagtccgtatgaaataaatgtgacctatatggatgcgttaagccgccgtgagagtagcgatgaagaacgttgcgccaggtttatccttgcccatgcgattttgttaagtttccccggtgtgccagcgatatatattcaaagtattcttggctcgcgtaatgattacgcaggtgtcgaaaaactcggatataaccgtgcgattaaccgtaaaaaatatcacagtaaagagataacccgagaactgaacgatgaagctacattaaggcatgcggtatatcatgagttgtcgcgtttaattacacttcgtcgcagccataacgagtttcatccggataataattttaccattgatacgattaattcatccgtaatgcgtattccaagaagtaacgctgatggtaattgtctgactggattgtttaatgtcagtaaaaatattcagcatgtaaatattactaatctgcatggtcgggatctgattagtgaagttgatatattgggtaatgaaataacgctgcgcccctggcaggttatgtggattaaataaaaaggaacatctcatgattaaatcaaaaatcgtgctgttatcagcactggtttcatgcgccctgatttcaggctgtaaagaagaaaataaaacgaatgtatccatcgaatttatgcattcttcggtggagcaggagcgccaggccgttatcagtaaattgattgcccgttttgaaaaagaaaaccctggcatcaccgttaagcaagtgcccgtggaagaagatgcctataacactaaagtcattactctttcacgtagcggttcgctgccggaagtgatcgaaaccagccatgactacgccaaagtgatggacaaagagcagcttatcgatcgcaaagcggttgccacagtcatcagcaacgttggtgaaggcgcgttttacgatggcgtactgcgtattgtgcgtaccgaagatggtagcgcatggaccggtgttcctgtcagcgcctggattggcggtatctggtatcgcaaagatgtgctggcaaaagcggggcttgaggagccgaaaaactggcaacagctgctggacgttgcacagaaactgaatgacccggcgaataaaaaatacggcattgcgctgcctacagcagaaagcgtgttgacggaacaatccttctcccagtttgcgttatccaaccaggctaacgtctttaacgccgaaggcaaaatcacccttgatacaccagagatgatgcaggcactgacctattaccgcgaccttactgccaacactatgccgggttctaacgacatcatggaagtgaaagacgcctttatgaacggcaccgcgccgatggcgatttactccacctatatccttccggctgtgattaaagaaggcgacccgaaaaacgtcggtttcgtggtgccaaccgagaaaaactctgcggtctacggcatgttgacctcgctgaccattaccgccgggcaaaagaccgaagagacggaagcagcagaaaaatttgtcacctttatggagcaggcagacaacattgccgactgggtgatgatgtcgccaggtgctgcgctgccggtgaataaagcggtggtgactaccgccacctggaaagacaacgacgttattaaggcgctgggtgaactaccgaatcagctaatcggtgaactgccaaatattcaggtttttggcgcagtaggggataaaaactttacccgcatgggtgatgtgacgggttctggcgtggtgagttcaatggtgcataacgtcaccgtgggtaaagccgatctctctactacgctgcaagcgagccagaaaaaactggatgaactgatcgaacagcactaaacccaggacaggaatccgcaatgaacaggcttttttcaggtcgttccgatatgccctttgcgctgctgcttctcgcgcccagcttattactgctgggcggtctggtggcgtggccgatggtgtcgaatatcgaaatcagttttttacgtctgccgctcaatcccaacatcgagtcaacgtttgttggggtgagcaactatgtgcgtatcctctccgatcccggcttctggcattcgctgtggatgacggtctggtataccgcgctggtggtggcgggcagcaccgtgctcgggctggcggtggcgatgtttttcaaccgcgagttccgcctgcgcaaaaccgcgcgttcgctggtgatcctctcctacgtaacgccgtccatttcgctggtgttcgcctggaaatacatgttcaacaacggctacggcattgttaactacctcggcgtcgatcttctgcatctctatgagcaggcaccgctgtggttcgataatccgggcagtagctttgtgctggtggtgctgttcgccatctggcgctacttcccgtatgcctttatctcgtttctggcgattttgcagaccatcgacaaatcgctgtacgaagcggcagagatggatggcgctaatgcctggcaacggtttcgtatcgtcacgctgcccgcaattatgccggtcctggcgacggtggtgacactgcgcaccatctggatgttctacatgttcgcggatgtttatttgctgacgaccaaggtcgatattctcggtgtatatctctacaaaaccgcctttgcctttaatgatttaggaaaagcggcggcgatctcggtggtgctcttcatcattattttcgctgtcattctgctgaccaggaaacgggtgaacctcaatggcaacaaataaacgcacactcagtcgcatcggtttttactgcgggctggcgctgtttctcatcatcacgctgtttccattttttgtgatgctgatgacctcgttcaagggcgcgaaagaggcgatctcactgcatcctacgctgctgccgcagcagtggacgctggagcattacgtcgacatttttaacccgatgattttcccgtttgtcgactacttccgtaacagtctggtggtgtctgtggtttcatccgtggtggcggtattcctcggcattcttggggcttacgcgctttcccgcctgcgctttaaaggtcggatgaccatcaacgccagcttttacacggtgtatatgttctctggcattttgctggtggtgccgcttttcaaaatcatcaccgcgcttggcatttacgacactgagatggcgctgatcatcaccatggtgacgcaaactctgcccaccgccgtgtttatgctgaaaagctacttcgacaccatccccgatgagatcgaagaagcggcgatgatggatggcctcaaccgtctgcaaattatcttccgcatcaccgtgccgttggcgatgtccgggctgatatccgtgttcgtctactgctttatggtggcgtggaacgactatctgtttgcgtcgattttcctctccagcgccagcaatttcaccttaccggtgggcctgaacgcgctgttcagtacgccagattacatctggggacggatgatggcggcctcactggtgaccgcattgccggtggtgattatgtatgcgctttcggaacgttttattaagagtggtttgaccgccggtggcgtgaagggctaaagcggccagtttctttacaaggagttttaaatgaaaaagttagtagccacagcaccgcgtgttgctgcgctggttgagtatgaagatcgggcgattttagctaatgaagtgaagatccgcgtgcgtttcggcgcaccgaaacacggaacggaagtggtcgacttccgcgccgccagcccgtttattgatgaagactttaacggcgaatggcagatgttcactccgcgtccggcagatgcgccgcgcggcattgagtttggcaaattccagcttggcaacatggtggttggcgacattatcgagtgcggcagcgacgttaccgactacgcggtgggcgacagcgtatgcggctacggcccgctctccgagacggtcatcattaacgcagtgaataactacaagctgcgcaaaatgccgcaaggcagctcctggaaaaacgccgtctgctacgacccggcgcagtttgccatgagcggcgtgcgcgatgccaacgtgcgcgtaggggattttgtggtggtggtagggcttggcgcaatcggtcaaattgccatccaactggctaaacgcgctggcgcttctgtggtgattggcgtcgatcctatcgcccatcgctgtgatattgcccgtcgccacggcgcggatttctgccttaaccccatcggcactgatgtaggtaaagagatcaaaacgctgaccggcaagcagggtgccgatgtgattatcgaaaccagcggctacgccgacgcgctgcaatcggcgctccgcggtctggcttatggcggcaccatctcctatgtcgcgtttgccaagccgtttgccgaaggttttaacctcggacgcgaagcgcatttcaataacgccaaaattgtcttctctcgcgcgtgcagcgaaccgaacccggattatccgcgctggagccgcaagcgtattgaagaaacctgttgggaactgctgatgaacggttatctcaattgcgaagatttaatcgacccggtggtgacctttgccaatagcccggaaagctatatgcagtatgtcgaccagcatccggaacagagcatcaaaatgggcgttacgttttaattcaaaggaatgaaaaaaatgaaaatcggcacacagaatcaggcgttctttccggaaaacattctggagaaatttcgttatatcaaagagatgggcttcgatggttttgagattgacggcaaactgctggttaacaacatcgaagaagtcaaagcggcgatcaaagaaaccggtttaccggtgaccaccgcctgcggtggctatgacggatggattggcgactttatcgaagagcgtcgtcttaatggcttaaagcagatcgagcgcattctcgaagcgctggcagaagtgggcggtaaaggcatcgtcgttccggctgcgtggggcatgtttaccttccgcttaccgccgatgacctcgccgcgtagcctggacggcgaccgcaaaatggtgagtgattccctgcgcgtactggaacaggtcgccgcgcgtaccggaaccgtggtgtatctcgaaccgttaaaccgctatcaggatcatatgatcaacaccctcgccgatgcccgccgttacatcgtcgaaaacgatcttaaacatgtacagattatcggcgatttctatcacatgaatatcgaagaagataacctggcgcaggcgctgcatgacaaccgcgacctgctcggtcatgtgcatattgcggataaccatcgctaccagccgggcagcggcaccctggatttccacgcgctgtttgaacagctgcgcgcggataactatcagggctatgtagtgtacgaagggcgtatccgggcggaagatcctgcccaggcgtaccgtgattcgttggcctggttgcgtacctgctaagaggtctttgtgaaaagtgcaatgacaagctctccgctgcgggtcgcgataataggcgcaggccaggtggcggataaggttcatgcttcgtactactgcacccgcaacgatctggaactggtggctgtctgtgacagccgcctttcccaggcgcaggcgctggcagaaaaatacgggaatgcatccgtgtgggacgatccgcaggccatgctgctggcggtgaaacctgatgtggttagcgtctgctcacctaaccgttttcattacgaacataccctgatggcactggaagcgggctgccatgtgatgtgcgaaaaaccgcccgccatgacgccagaacaggcgcgggaaatgtgcgataccgcgcgcaaactgggcaaggtgctggcctacgactttcaccatcgttttgcgctcgatacgcaacagctgcgtgaacaggtgaccaacggcgttttgggagagatttacgttaccaccgcccgcgccctgcgtcgctgcggcgttcccggctggggtgtctttaccaataaagaactgcagggtggtggcccgctgatcgacatcggcattcatatgctggatgctgcgatgtatgtgctgggctttccggcggtgaaaagcgtgaatgcgcatagctttcaaaagatcggcacgcaaaagagctgtggtcaatttggtgagtgggatccggcaacttacagcgtcgaagattcgctgtttggcaccattgaatttcataacggcggcattctgtggctggaaacgtcatttgcactcaacatccgcgaacagtcgattatgaacgtcagcttttgtggtgataaagctggtgcgacgctgtttccagcacatatctacaccgataacaacggtgaattaatgacgctgatgcaacgggaaatagcagacgacaaccgccatttgcgcagcatggaagcctttatcaatcacgtacagggcaagcccgtgatgatagccgacgccgagcaggggtacatcatccagcaactggtggcggcgttgtatcaatccgcagaaacagggacgcgtgtggaattatgaccaggccagtaacgttatcagaaccccatttcagccagcataccctgaacaagtatgcatcgctgatggcgcaggggaacggctatcttgggcttcgcgccagccatgaagaagattacacgcgccagacgcgagggatgtatctggcggggctgtatcatcgggcgggaaaaggtgaaatcaacgaactggtgaacctgcctgatgtcgtggggatggagattgccataaatggtgaggttttctcgttatcccacgaagcctggcagcgtgagcttgactttgccagtggcgaattacgccgcaatgttgtctggcgtaccagcaacggctcaggttacaccatcgccagccgtcgctttgtttcggcagaccaactgccgctcattgcgctggaaatcactattacgccactggacgccgacgcgtcagtgctgatttcaacaggcattgacgccacgcaaaccaatcacggtcgccaacatctcgacgaaacccaggtgcgggtgtttggtcagcatctgatgcaggggagctacaccacccaggatggacgcagtgatgtggccatcagctgttgctgtaaggtgagcggtgatgtgcagcaatgctataccgccaaagagcgccgtttactgcaacataccagtgcgcagcttcatgcaggcgagacaatgacgttgcaaaaactggtgtggatcgactggcgggatgacaggcaagctgctttagacgagtggggcagcgcgtcgcttcgccagcttgaaatgtgcgcgcagcagagttacgaccaacttcttgcagcatcaacagaaaactggcgtcaatggtggcagaaacgtcgtatcacggtaaatggcggcgaagcgcacgatcagcaagcgttagattatgcgctttatcatctgcgcatcatgacgcctgcccacgacgagcgcagcagcattgcggcaaaaggcttaaccggcgaaggctacaaaggccacgttttctgggatacagaagtatttttgttaccgtttcatctgtttagcgatccgacggttgcccgaagtttactgcgttatcgctggcacaacttgccaggcgcgcaggagaaagcgcgacgcaacggctggcagggcgcgctatttccgtgggaaagcgcgcgcagcggcgaagaagagacgccggaatttgccgccattaacattcgcaccgggctgcggcaaaaagtggcctcggcgcaggcggaacatcatctggtggccgatatcgcctgggcggttattcaatactggcagaccacgggggatgaaagtttcattgcgcatgaaggcatggcgctacttctggagacggcaaagttctggattagccgcgcggtgagagttaacgatcgtctggaaattcatgatgttattgggccagacgaatataccgaacatgtcaataataatgcatacaccagctatatggcccgctacaacgttcaacaggcgctgaatattgcccgccagttcggctgtagcgacgatgcgtttatccatcgcgccgaaatgttcctcaaagagctatggatgccagaaattcagcccgacggcgttttgccgcaggatgattcgtttatggctaagccggcgattaatctggcgaaatacaaagcggcggcggggaagcaaaccatactgctggattattcacgcgcagaagtgaacgagatgcagatcctcaaacaagctgatgtggtgatgctcaattacatgctgccggagcagttctcagcggcatcgtgtcttgccaatctgcaattttatgaaccgcgcactattcacgactcgtcattaagtaaagcaatccacggcattgttgccgcacgctgtggcctgctgacccaaagttatcagttctggcgcgaggggactgaaatcgatcttggtgctgatccgcatagttgtgatgatggtatccatgctgccgcaactggcgctatctggctgggggcgattcagggttttgccggggtgagcgtgcgtgacggtgaattgcatctcaatccggcgttacctgagcagtggcaacagttgtctttccctctgttctggcagggctgcgaattacaggtcactcttgacgcgcagcgtattgcgattcgaacttctgcgcccgtttcactgcgtttgaacggtcagcttataaccgtggctgaagaatctgttttctgtttgggtgattttattttgcccttcaatgggaccgctaccaaacatcaggaggatgaatgaaactgcaaggggtaattttcgatctggatggtgtaatcaccgataccgcgcatctgcatttccaggcgtggcagcagattgccgctgaaattggcatcagcattgatgcgcagtttaacgaatccctaaaagggatcagccgcgatgagtctctgcggcgcattctgcaacacgggggcaaagagggcgactttaactcgcaggagagggcgcaactggcgtatcgcaaaaatctgctctatgtccactcactacgcgagttgacggtcaacgctgttctacccggcattcgctctttgctggcagatctccgtgcacagcagatctcggttgggctggcttctgtctccctgaatgcgccgacgattttagcggcgctggagctgcgcgagtttttcaccttctgcgcggatgcttcccaacttaaaaactcgaaaccggacccggaaatctttctcgccgcctgtgcagggctgggcgtgccgccgcaggcatgtatcggcattgaagatgcgcaggcgggcattgacgccattaacgccagcggtatgcgctcggtggggatcggcgcgggcttaaccggggcgcaattactgttgccttcaacggaatcactcacctggccgcggttatcggccttctggcaaaacgtatagcaaaggaatcaacatggctcagctttcgttacaacatattcaaaaaatctacgataaccaggtgcatgtggtgaaggacttcaacctggaaattgccgataaagagttcatcgtgtttgtcggcccgtcgggctgcggtaagtcgaccaccctgcgcatgattgccgggcttgaggagatcagcggcggcgatctgttgatcgacggcaaacgaatgaatgacgttccagccaaagcacgcaatatagcgatggtgttccagaactacgcgttgtatccgcatatgacggtttacgacaacatggcgtttggtctgaagatgcaaaaaatcgccaaagaggtgattgatgagcgggtgaactgggcggcgcaaattctcggcctgcgtgagtacctgaaacgtaagccgggggcgctttccggcgggcaacgtcagcgagtggcgcttgggcgggcgattgtacgcgaagcgggcgtgtttttaatggatgaaccgctctctaaccttgatgccaagctgcgcgtgcaaatgcgcgcagagatcagcaagctgcatcagaaactgaacaccaccatgatctacgtgacccacgatcagaccgaagcgatgaccatggcgacgcggattgtgattatgaaagacgggattgttcagcaagtaggtgcgccgaaaaccgtttataaccaacccgcgaatatgtttgtttccggatttattggatcaccagcgatgaattttattcgcggcacgatcgatggcgataaattcgttacggaaacgcttaaattaaccattcccgaagagaaattagcggttctgaaaacacaggaaagtttgcataagcccatcgtgatgggaatacgaccggaagatattcatccggacgcgcaagaggaaaataacatttccgccaaaattagcgtggcagaattaaccggtgcggaatttatgctctacaccacggttgggggcacgagttagtggtccgtgctggtgcgttaaatgattatcatgcaggagaaaatatcactattcattttgatatgacgaaatgtcatttctttgatgcagaaacggaaatagcaattcgctaaatacagggggaaggcattcccccaggataatacaaggaacaataatgaaaaagttattaccctgtaccgcactggtgatgtgtgcgggaatggcctgcgcacaggccgaggaaaggaacgactggcactttaatatcggcgcgatgtacgaaatagaaaacgtcgagggttatggcgaagatatggatgggctggcggagccttcagtctattttaatgccgccaacgggccgtggagaattgctctggcctattatcaggaagggccggtagattatagcgcgggtaaacgtggaacgtggtttgatcgcccggagctggaggtgcattatcagttcctcgaaaacgatgatttcagtttcggcctgaccggcggtttccgtaattatggttatcactacgttgatgaaccgggtaaagacacggcgaatatgcagcgctggaaaatcgcgccagactgggatgtgaaactgactgacgatttacgtttcaacggttggttgtcgatgtataaatttgccaacgatctgaacactaccggttacgctgatacccgtgtcgaaacggaaacaggtctgcaatataccttcaacgaaacggttgccttgcgagtgaactattatctcgagcgcggcttcaatatggacgacagccgcaataacggtgagttttccacgcaagaaattcgcgcctatttgccgctgacgctcggcaaccactcggtgacgccgtatacgcgcattgggctggatcgctggagtaactgggactggcaggatgatattgaacgtgaaggccatgattttaaccgtgtaggtttattttacggttatgatttccagaacggactttccgtttcgctggaatacgcgtttgagtggcaggatcacgacgaaggcgacagtgataaattccattatgcaggtgtcggcgtaaattactcgttctgataatgggctaaattgccggatgcggcgcgagtactttatccgatctataaatgtaggccggataagatgcgctagcatcgcatctggcattcaggcaaggtagctggtatttatttcagcgtcatatgcgtggcaacggtaatattctgtggtgacggttttccagaaattaagcggaataataactcgcagctttgttgacctaactcctgcgtcggaacatcgatgccgcccggtgcaggcgttaaaataaatgacagcgtttcattgctataacccaccaccgctaactgctgcggaatagcaatatttttctctgctgccgcacgataaatgctcattaatttcaggctgtcagtggcaaacaccgcctcaggcaacggtgactggcttaataattgccgtgctgcttttaatgcagtttcatgggtataaccgccatcaacaatccattcatcacgcactgcaatattatgcgcagccaggctctgcttataaccattaacgcgatcaaccgaaacatggacatcaagcggagcatgcaggcaggcaatattttgatgcccactttcaattaatgcatcggtcaacgcaatgctgtcgccaaaattatcggtatcgacagaataaacatgggcatattgaccttcaactttgccaatcaccaccaccggaatatcatatttatcgagttgggcaaaaaatgactcatccgctggcgaactgagcataataatgcctttaatcattttctgcttaattttgctttcgcatttttgcagatcttctgccggattgtgcgacgtttgtaatatcacgtcgaaaccttcttcttcagctttggcggtgatggcatgcaaaacttcagagaaaaacggattacccgccgtagttttggtcgaacgggtagaaatcaccataatggcatcaaaacccgaagaggtcagcgcgcgggccagcttgtttggctgatactgtaattcttcaatggcccgtaacactttttcgcgcgcttccggggagatattagtttgcttattcagcacgcgtgatacggtggattttgatacgcctgcaaccctggcaatatcataaatagtaggggacataggtcaggaactccgtccgaacgtgaatgctgcacatcttatggagttcgccggtcgatgacaacacgggcagttgataatcaatggcctggcccccacattcatatccttacgaatgattttttttctggtcttcagagcagcacaggacagcaatgaagcgacttaaaaatgaactcaatgcgctggtgaatcggggtgtcgacagacatctgcgcctcgctgtaaccggacttagccgcagcggcaaaacagcgtttatcaccgcgatggttaatcagttgcttaatattcacgccggagcacgtttgccgctgttaagtgcggtgcgtgaagagcgcctgctgggcgtgaaacgcattccccagcgtgactttggcattccgcgcttcacctatgacgaagggctggcgcagttatatggcgatccacccgcctggccaacgccaacgcgcggcgtcagtgaaatccgcctggcgctacgttttaaatcgaatgattcgctgctacgccactttaaggatacctccacgctgtatctggaaattgtggattatcccggcgaatggttgctcgacctgccgatgctggcgcaggactatttaagctggtcgcgccagatgacgggcttactcaatggtcagcgcggagaatggtcggcgaaatggcgaatgatgagcgaagggctggacccgctagcgcctgccgacgaaaaccggctggcggacattgccgccgcgtggaccgattatctccaccactgtaaagagcaggggctgcactttattcagcctgggcgctttgtcttgccgggagatatggcaggtgcgcccgcgctgcaattcttcccgtggccggatgtcgatacctggggcgagtccaaactggcgcaggccgataagcataccaatgccggaatgctgcgcgagcgctttaattattactgcgagaaggtggtgaaggggttctataagaatcattttctgcgctttgaccgccagattgtgctggtggattgcctgcaacctctcaacagtgggccacaggcatttaatgatatgcgtctggcactgacgcagctgatgcaaagttttcactacgggcagcgtaccctgttccggcgtttgttttcgccggttatcgataagctattgtttgctgccactaaagcggaccatgtgaccatcgatcagcacgctaatatggtttcattactgcaacaactgattcaggatgcctggcaaaatgcggcgttcgaagggatcagcatggactgcctggggctggcgtcagttcaggcgaccaccagcggcattattgatgttaacggtgagaaaatcccggcgctgcgtggtaatcgacttagcgatggcgcaccgctcactgtttatcctggcgaagttcccgcacgtttgcctggtcaggcgttctgggataagcaaggcttccagtttgaggcatttcgtccgcaggtgatggatgtcgacaaaccactaccgcatattcgtcttgatgctgcgctggaatttttaataggagataaattgcgatgaccgaaccgttaaaaccacgtattgatttcgacggtcctctggaggtcgatcagaatcctaaattcagggcgcagcagacctttgacgaaaatcaggcgcaaaattttgccccggccacgctcgacgaagcgcaggaagaagaggggcaagtcgaagcggtaatggacgcagcgttacgtccgaaacgcagcctgtggcgcaaaatggtgatgggagggctggctctgtttggcgcaagcgttgtcgggcagggtgtacagtggacaatgaatgcctggcaaacccaggactgggtggcgctgggtggatgtgccgctggggcattgattatcggcgctggcgtaggttctgtggtaacagagtggcggcgcttatggcgcttgcgacagcgcgcccatgaacgcgacgaagcgcgtgatttattgcatagccacggcacgggcaaaggccgcgcattttgcgaaaaactggcgcagcaggcgggtattgatcagtcgcatccggcgctgcaacgctggtatgcctcaatccatgaaacgcaaaacgaccgtgaagtggtcagcctgtatgcgcatttggtccagccagttttagatgcccaggcgcggcgcgaaatcagccgttcggcggcggaatcaacgttgatgattgcggtcagcccgctggcgttggtcgatatggcgtttatcgcctggcgcaatctgcgtttaattaatcgcatcgccacgctgtatggcattgaactggggtattacagccgtttgcgtctgtttaagctggtattgctgaatatcgcttttgccggagccagcgaactggtgcgcgaagtggggatggactggatgtcgcaagatctcgctgctcgtttgtctacccgcgcagctcaggggattggtgcaggacttctgacggcacgactcgggattaaagctatggagctttgccgcccgctgccgtggattgacgatgacaaacctcgcctcggggatttccgtcgtcagcttatcggtcaggtgaaagaaacgctgcaaaaaggcaaaacgcccagcgaaaaataatgcaatatcgggtgctgaccggatatctttacgccgaagtgcccgtttttccgtctttgtgtcaatgattgttgacagaaaccttcctgctatccaaatagtgtcatatcatcatattaattgttcttttttcaggtgaaggttcccatgcgtctggaagtcttttgtgaagaccgactcggtctgacccgcgaattactcgatctactcgtgctaagaggcattgatttacgcggtattgagattgatcccattgggcgaatctacctcaattttgctgaactggagtttgagagtttcagcagtctgatggccgaaatacgccgtattgcgggtgttaccgatgtgcgtactgtcccgtggatgccttccgaacgtgagcatctggcgttgagcgcgttactggaggcgttgcctgaacctgtgctctctgtcgatatgaaaagcaaagtggatatggcgaacccggcgagctgtcagctttttgggcaaaaattggatcgcctgcgcaaccataccgccgcacaattgattaacggctttaattttttacgttggctggaaagcgaaccgcaagattcgcataacgagcatgtcgttattaatgggcagaatttcctgatggagattacgcctgtttatcttcaggatgaaaatgatcaacacgtcctgaccggtgcggtggtgatgttgcgatcaacgattcgtatgggccgccagttgcaaaatgtcgccgcccaggacgtcagcgccttcagtcaaattgtcgccgtcagcccgaaaatgaagcatgttgtcgaacaggcgcagaaactggcgatgctaagcgcgccgctgctgattacgggtgacacaggtacaggtaaagatctctttgcctacgcctgccatcaggcaagccccagagcgggcaaaccttacctggcgctgaactgtgcgtctataccggaagatgcggtcgagagtgaactgtttggtcatgctccggaagggaagaaaggattctttgagcaggcgaacggtggttcggtgctgttggatgaaataggggaaatgtcaccacggatgcaggcgaaattactgcgtttccttaatgatggcactttccgtcgggttggcgaagaccatgaggtgcatgtcgatgtgcgggtgatttgcgctacgcagaagaatctggtcgaactggtgcaaaaaggcatgttccgtgaagatctctattatcgtctgaacgtgttgacgctcaatctgccgccgctacgtgactgtccgcaggacatcatgccgttaactgagctgttcgtcgcccgctttgccgacgagcagggcgtgccgcgtccgaaactggccgctgacctgaatactgtacttacgcgttatgcgtggccgggaaatgtgcggcagttaaagaacgctatctatcgcgcactgacacaactggacggttatgagctgcgtccacaggatattttgttgccggattatgacgccgcaacggtagccgtgggcgaagatgcgatggaaggttcgctggacgaaatcaccagccgttttgaacgctcggtattaacccagctttatcgcaattatcccagcacgcgcaaactggcaaaacgtctcggcgtttcacataccgcgattgccaataagttgcgggaatatggtctgagtcagaagaagaacgaagagtaagcgcgaatatgcctgatggtgcaacaccatcaggcatattaaattatgctttcagtacagccagagctgcttcgtaatccggctcggtggtgatttcatccaccagctggctgaaaatcacattgtcattttcgtcaataaccacaacggcacgcgctgccagacctttcagtgggccatcagcaattgccacaccgtaagcttgcagaaattcagcgttacggaaagtggagagggtgataacgttgttcagaccttctgcgccgcagaaacgagactgggcgaacggcagatcggcagagatacacagcacaacggtgttgtcgatctcagttgccagttggttaaacttacgtactgatgcggcgcaaacaccggtatcaatactcgggaaaatgttcagcactttgcgtttacccgcaaactgaccgagggtgacgtcagacagatcttttgccacgagagtaaaagtctgcgctttgctacccgcctgcgggatggaattggcgactgtaaccgggttgccctggaaatgaacggtttgtgacatgattatctttcctgtttacatatagttaacgtcacacctagtttatgctaactgtcaataacacagcaaacgctatttgcgcttaatccgcagaccaccgcgacaacaaggagtaaagatgagaaccgttaaggtattcgaggaagcctggcccttacataccccgtttgtgattgcccggggaagtcgcagtgaagcgcgcgtggtggtggttgaactggaagaagagggtattaaaggcaccggcgaatgcacgccgtatccgcgttatggggaaagtgatgcctcggtaatggcgcaaattatgagcgtcgtgccgcaactagagaaagggctgacacgggaggagttgcaaaaaattctccctgccggcgcagcacgtaatgcgctggattgtgcattgtgggatctggccgcgcgaagacagcagcaatcgctggctgatttgatcggcataacgcttcccgagacagttatcactgcacagacggttgtcatcggtacgcctgatcagatggccaatagtgcatcaacactctggcaggcaggcgcgaaattactgaaagtgaagctggataaccatcttatcagtgagcggatggtggcaattcgcacagctgtgcccgatgcgacgctgatcgttgatgcaaatgaatcctggcgtgcagaagggttggcggcgcgttgccagctattggcggatttaggcgttgcgatgcttgaacaaccgcttcctgcgcaggacgatgcggcgctggagaattttattcatccgttgccgatttgtgctgatgaaagttgtcatactcgtagcaatttgaaggcgctgaaagggcgctatgagatggttaatattaagctcgataaaaccgggggtctgacggaagcgctggcgctggcgactgaagcgcgtgcacaaggtttcagtctgatgctgggctgcatgttgtgtacctctcgtgccattagcgccgctttaccgctggtgccgcaggtcagtttcgccgatcttgacggaccgacctggctggcggtagatgtggaaccggcgcttcagttcacgacgggcgaattgcatctttaggatgccagcgcagcaagtttgccatcgcaaagagatatttttcgctggcttcgtcggaggagatgggcggaaactctgcggtgatgcaatgcaagttcagatctgcacaccaactgccgaaagagccaggcgtttcataaccgacgctggttaccagaggcaattcaaacgcctgagccagccattcgcctaattcgctgtgtctgggatcttcaatacaggccagtggatcgtggaatgagaccacccaggcaggttgaatgcggtgtataagctggcacagcgcctgggtttcaggttcggagccaggtttgtcacctgtcagtaatacgacatcgcgttcttcagcggcgctgttccagcgataaacggtttcaccttccttccagttcgccgccggaaagtttctgtttaaatccacaccattagcattggcccgtaaccccaactggcagccgtcaggattcacacacagcaccacatgatgacggcgcaaagaaggtgtcaacgtccgcagagcacaggagagcgtgacgaccgaagagttttcatcaccgtgagtgccagccagaatcaaaccactttcgcggctggctgcaggggcaggaaaccagattaacggcgcgcccaataatgaacgtccgtaatgttctgttccgggcggaaatgcgccgcgttcggcgcgtgggcgggttacggtcatgatcgtctctggttcaggaagtattacaggcagtgttgtgcaaattttgcggattatcaaatccttttcttcaacgctatgtcatcgatcttgtatcacttttttgccggaagttgtttgcattttattagttggatagggtttgtggatttttgctggctgacgggcaaataaagtttgtttaatggtttgcttatctgccagttgattaatcacatggcgggctatctgaccgccagcaccaagaatcagtacatttttcatgaaaattatcccagattattggcagcaatatgccagtccatatcactattgcggatttgaatatgtttcattacagagtttcctcaaagaacggagctaatactgaaattgcttcagccacataggctttgccgtcataaagatccatatggtttgcgccttcaacaatgtgatagcgtttatcctggcttgatgctcgatcgtacaggtcgtcactcatccatttgctccctgcctggctgcccgccacaatctgcgtcggctgagtcaggtacacttccgccatatggtaagcatcataggtaataatctggttaaggctgcgcaaagtagcgtaacccggtgctgttggatactgcgcgcgaggggtgtggtaatactcccaggcctgacgcagttcttcgttcggcgcatcggactccttcattggtgccagtggcataatggcgtattctccgctgctaatatcgctggttctggcgtttgaacccgcttcaacgtatggcagggcatcaatagatttcacattgttttcccaaccattacggaatatcgaaccaatattgaccgcactaacggtaccgatggccttgatgcggcgatcctgaattgcagcattggctgtatatcctgcaccggcacaaattcccatcgcaccaattcgggtattgtcgacataagaaagcgttgtcaggtaatcaatcacggcactgatgtcttcagtacgaatgtatgggttttctaactgacgcggctcgccgccactttcaccttgataagatgcgtcataagcaatagtgacaaatcccttttccgccagttttttggcataggttccggccgtttgttctttaacgcccccacctgggtgagataacacaattgcctgatactgacgggtttcatcaaattttggagggaaatagatcactgcagacaaagagatggttggattattgctgttagtgaagctgactttattattcatcattccgttcctcatggagttgtcggttcgttttaacggttggtgatatcactatagatattgatcattaagttgattagacccaaaatcatgattagacctatcatttaaatgattaatagattgcatggagatactgaatgaagcgtgaagaaatcgctgatctgatggcgtttgtcgtcgttgcagaggagcgtagcttcactcgtgcagcagcccgcctgagcatggcgcagtcagctttaagccagatagtgcgtcgtatagaagaacgattgggattgcggcttctgacgcgaaccacgcgcagcgttgttccaactgaagcgggcgagcatcttttgtctgttcttggccctatgttgcatgacatagattcagccatggcatccctgagcgatctgcagaaccgcccatccgggacaatacgtattactactgtagaacatgcagcaaaaacgatattgttaccagcaatgcgcacattcctgaaatcgcatcctgaaattgatattcagctcaccattgattatggtttgaccgatgtcgtttctgaacgttttgatgcaggcgtccgtctgggtggggagatggataaagatatgatcgccattcgaatcgggccagatataccaatggctattgttggctcaccggattatttttctcgccgaagtgttccaacgtcagtgtcacaattaatagatcatcaggcaattaatttgtatcttcccacatcgggtacagcaaatcgctggagattaatacgcggtggacgtgaagttcgtgttcgcatggaaggtcagcttttactgaatacgatagacctgatcattgatgctgcaattgatgggcatggattggcgtatctaccttatgatcaggttgagcgggctattaaagaaaaaaaactgatacgtgttttggataaattcacaccagatttacccggttatcacctgtactatccacaccgtcgacatgctggctcggcattctcattatttatagataggctgaagtataaaggtgctgtttagcactacttgctgatacattaatttaattcttctcttaacgtattctcagttcctttcaacgttttggtcattttttattcttcgtacaatggcgacagatgctgattatgataccgaaaacgggtttgaacgtgcgaagcccgaacgtagtgttcggagttctatgtgctttaccgcattttggagactattatttacactaaatctgatttgatatattgatacttaaaacatttgatgcttcctttgtcacttttttgatggaagttgtttgcatttctttaaggcgaaacaaataattacgcatcaattttaatgtcggttagagggaaacttatgaagcactctgtttcagtcacgtgttgtgcgctgttggtcagcagcatttctctttcgtatgctgcagaagttccgagcggcacagtactggcagagaagcaggagctggtgcgccacattaaagatgagcctgcgtcgctggatcccgctaaagccgtgggcctgccagagattcaggtcattcgcgatctgtttgaaggtctggtgaatcagaacgaaaaaggggagattgtccccggcgttgcgactcagtggaaaagtaatgacaaccgtatctggacttttaccctgcgcgataacgcaaaatgggcggatggcacaccggtaacggcgcaagattttgtctacagctggcaacgtctggtggacccaaaaacattgtcgccatttgcatggtttgccgcgctggcgggaatcaacaacgcacaggcgattattgatggtaaagctacgcctgaccagcttggcgtcaccgcagttgatgcccatactttgaaaattcagcttgataaaccgttgccgtggtttgtgaatttaaccgctaactttgccttcttcccggtgcaaaaagccaacgtagaaagcggtaaagagtggacgaaacccggaaatctgatcggcaatggcgcttatgttcttaaagagcgcgtagtcaatgaaaaactggtcgtggtaccgaatacccattattgggataacgccaaaacggtactgcaaaaagtgaccttcctgccaattaatcaggaatccgcagccactaagcgttacctcgcgggggatattgatatcaccgaatccttcccgaaaaatatgtatcagaagctgttgaaggatattccggggcaggtttatacgccgccgcagctcgggacctattattatgcgtttaacacgcaaaaagggccgacggcagatcagcgcgttcgtctggcattaagtatgacgatagatcgccgcctgatgaccgaaaaagtattagggacgggcgaaaagccagcgtggcattttacaccagatgttaccgcgggatttacgccggaaccttcgccgtttgaacaaatgagtcaggaagaactgaatgcgcaggcaaaaactttgttgagcgcagctggttatggtccgcaaaaaccgctgaagctgacgcttttgtataacacttcagaaaaccatcaaaaaattgcgattgctgtagcatcgatgtggaaaaagaaccttggcgtagatgttaaattgcaaaatcaggaatggaaaacctatatcgatagccgtaacaccggcaattttgatgttatccgcgcctcgtgggtgggggattataatgaaccctccactttcctgacattattaacgtcaacgcattcaggaaatatttcacgctttaacaatccggcatatgacaaagttctggcccaggcatcgacggaaaataccgttaaagcgcgtaatgccgattacaacgcggcagaaaaaatcctcatggagcaagcaccgattgcaccaatttatcaatataccaatggacgattaatcaagccgtggctgaaaggttatcccattaataatcctgaagatgtggcgtacagtcggactatgtatattgtgaagcattgatgtgatgggaactggcgttacccttgtgcataacgccagtgatgtctgatttagcgaccctgttccggcggtgtaatgttatccatatacagcgtctggctggggaaggcaaagtccgcgccgtgtgactgtacaatatcgataatcttcaaataaacgtcttgctgtgcagcaagccattcagcccataccgtggttttggtaaagcaataaaccataatattcaatgaagagtcagcaaactggttgaaataaaccagtaaggtttgtcgctggtcgatggccgggtgatttttcagcatctcacgtacagcttcgacaataacgcccacttttgccgcatcctcataacgtaaaccaatggtcgtggtaatgcggcggttggtcattcgtcctgggttttctacgctgatcgacgaaaacagcgagttcggtacgtacaatggacgattatcaaaggtcgtaattttggtaattcgccagccaatttccgctactgtaccttcgatatttctgtccggtgaacggatccagtcgccaatactgaaaggacggtcgaaatagagcataatcccggaaaagaagttactcagaatatctttaccggccataccgacagccagaccaccaataccaccaaaggtcagcaagccagaaaggctcatgccgaaatgttcgccataaagcagaacaagcaccacaataatggtgattttgatgatacgcgacataatccgcgcactggtgatatcgcgaccttttttaatctgctgtttttcaaactgattaatcagcagaaatagcttaatcgtcagaataaccgcaatcagggacgtacagataaaatcgataacgcctggggtgataaatttgagtttatagttttctataacataattaataatgctaccaacagcactgataattatggtgtagattaaaaattgcaccgcatggaataaaaatccttttcttttacgatttccacggcgaaaccaaaagctcatcagaatcaatgctgcgcagctaccgaaaataatgaccagattaagcgcattatttgtaaacagttcagcgatcattgttttatcaggctcctccagataattgtcgtcatgccggaaacccctggcggggctattttaccgcgacaattcattcagatcatcaatagtcagggaaggaagtagcaacattagctaaggaaggtgcgaacaagtccctgatatgagatcatgtttgtcatctggagccatagaacagggttcatcatgagtcatcaacttaccttcgccgacagtgaattcagcagtaagcgccgtcagaccagaaaagagattttcttgtcccgcatggagcagattctgccatggcaaaacatggtggaagtcatcgagccgttttaccccaaggctggtaatggccggcgaccttatccgctggaaaccatgctacgcattcactgcatgcagcattggtacaacctgagcgatggcgcgatggaagatgctctgtacgaaatcgcctccatgcgtctgtttgcccggttatccctggatagcgccttgccggaccgcaccaccatcatgaatttccgccacctgctggagcagcatcaactggcccgccaattgttcaagaccatcaatcgctggctggccgaagcaggcgtcatgatgactcaaggcaccttggtcgatgccaccatcattgaggcacccagctcgaccaagaacaaagagcagcaacgcgatccggagatgcatcagaccaagaaaggcaatcagtggcactttggcatgaaggcccacattggtgtcgatgccaagagtggcctgacccacagcctggtcaccaccgcggccaacgagcatgacctcaatcagctgggtaatctgctgcatggagaggagcaatttgtctcagccgatgccggctaccaaggggcgccacagcgcgaggagctggccgaggtggatgtggactggctgatcgccgagcgccccggcaaggtaagaaccttgaaacagcatccacgcaagaacaaaacggccatcaacatcgaatacatgaaagccagcatccgggccagggtggagcacccatttcgcatcatcaagcgacagttcggcttcgtgaaagccagatacaaggggttgctgaaaaacgataaccaactggcgatgttattcacgctggccaacctgtttcgggcggaccaaatgatacgtcagtgggagagatctcactaaaaactggggataacgccttaaatggcgaagaaacggtctaaataggctgattcaaggcatttacgggagaaaaaatcggctcaaacatgaagaaatgaaatgactgagtcagccgagaagaatttccccgcttattcgcaccttccctaactaatcaatgcgttgattgtaaatccagctaagaggtgaggttttcagagcagacaacggtgaaatgtcatggtattgttacgtttaggtaacaagaaatttgtctgcacaaggattacatcatgattatggcgaaactgaagtcagcgaaagggaagaaatttctctttggtttgttggcggttttcattattgcggcgtcggttgtgactcgcgcgaccatcggcggcgttatagaacagtacaatattccgctgtctgagtggacgacatcaatgtatgtgattcagtcatcgatgatttttgtttatagcctggtctttactgtgttgctggcaatcccgttgggaatttatttccttggcggcgaagagcagtaagtaaaaaataggcccgataactcgggccttgtcagttattgaagagtcgttaatcgtcttcttcgtcatccagttcaacgggtgtctgatactggtcaggtttaatgaccagcaggtcgcagcgaagatgatcaatcacctgttccgccgtgttgccgaggaatgctgctgaaataccggtgcgtcctaccgtgcccagaaccacaatccccgcctgtaagtgctccgccaaatcaggaatcacctcttctggcagacctttttctacgtgcgtcatgttttcattaatgccgaatttctgccgcagggctttcattgccagcaaatgttgcccacgaatggcatcgttataaacgctcgggtcaaattccggcagttcaatcgcgatattaattggcgttaccggataagcgccaaccagatgaacttcggtatggttgacttgttctgccagttcgatcgtctctttgaccagtttttcattgagcgcattatgatacggctcttcactggcgagattcaccgccaccagcgccttgcctccttccggccacggctggtctttcaccatccacaccgggcttgggcatttgcgtaacagatgccagtccgttggcgtaaaaatcaccgcttccagacggtcatgttggtgcgccatttttagcaccaaatcgtgtccgccgctgatcacttcctgaatgatggcttcgaaaggacggttatgccagaccactttaatttcaatgggaacgccagcattgagataatattttgcctgctcgtggatccaggctgtacgctggctgatgacgccctgacgcatagcggtacgttcgtccggggagagcagggtggtcatttcgtatgagaagtcatagatcggcaaaaaggctttaattttgccaccaatccgttgatgtaaataaacagctcgccgcaatgctggttggtcgtcctggttaggatcgataacaacgagcatgttctgatacatagccatacagggtctccttacaacaactgtcaacgcagtttgtaattaaaagattaacccatatctggtgaatgaaacagtgatgaaccttctgccagatcaataaatcagaaaaatttaatgatatgacagaaggatagtgagttatgcggaaaaatcaggcaacgttacgcgtatgaccagcaagctgggccagcgcatcgttattttcgatggtgatgtatttacctttgactgccagcatgccgcttttctggaagcgacccagcagacggctgatggtttctaccgtcaggcccagatagttaccgatatcgccacgagtcatcgtcaggcggaattcacgaggggagaagccgcgttgggcaaaacgacgggacaggttgtagatgaatgcagccagacgttcctcggcatttttcttcgacaacagcaggatcatgtcctgatcgcctttgatttcaccgctcatcagacgcatcatctgctgacgcagattcggcattttaccggacaaatcgtccagcgtttcgaacgggatttcacataccatcgaggtttccagcgcctgcgcgaagctcgggtgatggccgctgccgatggcgtcaaatcccaccaggtcgcctgctaaatggaaaccagtgatttgctcgtcgccttgctcagtgatggtataacttttaatcgtaccggagcggatggcataaagcgatttaagttcatcaccagccttaaacagcgtctggcctttctgaataggcttcttccgctcaatgatattatcaagctgatcaagctcatgttcgttgagtgtgaacgggatgcaaagctggctgatgctgcaatcctggcaatggatagcacaaccgccagactgaatgcgccgtataattcgcttttccgggatcataggtctgctcaagccgtaattgatatttgtcaattttaacatctttttagggagcaagtaagtctaagcaaaccttaacagcagagaattccgatattagatgtaaatatatgtctatctatttgaaaacccttaagttgttaagggtaactttacataaaagtgtgaacaagctggcacaaattgtttaatgtttacagcaaaagataaccttcatggcgcaataaccactcttttcgctgaactccgcctgcatatccggtcatggtgccgtttcggccaataacccgatggcaaggtacgacgatgctgatgggattcgatccgtttgccgcaccaacggcacgcgccgcgccaggacggcccaattgctcagccagttggccgtaatgcattacctgcccgcaggggatagtgcgtagtgttttccagacttcgcgctgaaatggcgtcccccccgtagcagtgggaagcgtatcaataatgctaagattaccggcaaaatattcacgaagcttgtcgcttaaaccgcctggattggtggcagaaatgcgctcatagccttctttgcgataatggatgtccagcagctgcaccatgcgttcgctgtactcttcccattcaaccgcccgcaggcgaaattgctcatcgcaaatcacccacagtggacccagtggcgtggcaattttttcttcaagtaatctcagcatccgttctctcttaagacaaacgtgggtaaatacccggacctatcggcagaccgacaagataccacgccagcaacatcagcagccataccaccaaaaagataagtggatagggcaagactaacgaatagtaagtacccagtttcgcgtctggtttgtagcgttgcaggaatccaagaaacagtggaacaaaaggagataccggcgctaaaggcaatacggatgagtcggcaatacgaaagaggatttgcgcaaatgccgggtgaaagccaagtagcataaacattggtacgaaaatgggggcgagaatcgaccagattgcggaaccgctggcaataaacatgcataagaaagaggaaagcaacgccagaccgacaaacgccgggatgccgctaagccctgaactttccagtatatcggtcagccccacggcgatgaatttccccatgttgctccagttaaacatggcgacaaattgggcgaggggaaaaaccatcacgataaatcccgccatctctttcatcggttcaatcattaaatgcggtaaatccgcctgacgtcgaattgtgcgggtagcgatgccataagccagcgagacaacaaagaaaaaaagaatgatcagtggcacgatacctttaataaagggtgatggcatcacggtgtgattaatcggatcgcgcaatatcccgttttgcgggatcaccatcagcgcaatcgcagcaataaaaagtagcgatacgacacctgctatgcgtaaaccaaaacgctgactttcggtcaatgtctgcagtttctcatcgctgtttccctgccattgacctaaccgtggctcgatgattttgtcggttatcaggccgccaacaatcgtcagtacgactacggagctggccataaaataccagttatcaattacactgacgtgcatttgcggattgaacgcagctgccgcttccgtgctgatccccgacagcaacacgtcggttgtgacaatcagtaaattagccgtaaagccgcaacctacgcctgcaatggcagccagtaaacctgcaactggatgcctgcccaccgccagaaaaatcagcgcacccatcggtggcatgatcactaacgccgcatcggaagaaatgtggctgaaaaaagcaataaacagcaccatataactggcgtagcgggcattaacatgcgatgccattttaaccattagtgctggcagtaagccgacgcgctccgccagaccggcacctaaaaccagcgccaggatcgcaccaagtggagcaaaaccgctaaagtttttaataacattgggtaaaaaccagtgtaatccttccacactgagcaggtttttcaccacgaccggcgtaccatcggtcgggtttttcgcactgacgccaaaggccgacaaaattgccgtcgtcaccatgagtacgataatcaaatagataaagagcagaaaaggatggggaaccttgttaccaattctttcgacccagccatagagcttcccggattgggaggacgacggtatggatgacatactcatgggcattcctcggttgttgtgtttgcgttgttgttgttattttaaaggtgacggtgtcacgtttttcgggatagggcagtgatacggttgcgtgtccgttacttgctgatgctcttgttggcattcttgcaatagccctgaatcaaggaagagattgactgtggttgctgccatagttttcgccgccagcagcattcctttatgagcaatagatgttcgcccctggctaaccagttgccacgtatgtagcggtgtaccgacggcaaaacaggggctgaaacactgggcaacaggcagtttccaactgacgtcgccgacatcagtcgatgccgcaagcacgttatcggtggcggcatatggagcgacttcattcgccagtaccgtttcacgatgacgtagtgcaaaaaccttgccgttttcgccaccggttgcggcgatattattcagactgttttgccgatcgttggaggtgagcgtagcctgaatttgtttcgcaaaagccagttcttcggagttccattccggggtaccaaaatgggatagggcctggtacatggcattttctaaggtgcgattcgggagataactggaacaggctttgtcgaagcggcattcaaccgtggtttcggtcatcaatgccgcaccttcggcgattttggcgacccgatcataaatatgctgcacgtcggtcatttcgggggcgcggataagataaagcacttctgcctgcgcctggaccacgttgggcgagatcccgccgctatttgtgatggcatagtgtacgcgcgctttttcaataatatgttcgttgaggaagttggtgccagtggtcatcaacgttacggcatcaagggcgctgcgtcccaaatgaggggaattcgcggcatgtgctgcgatccctttaaagcgccatgatgcctgaatgtttgccagcgtgcgggtattgaacataccggcaaaggcttccgggtgccaggtgagtgccgcatccacatcatcaaataccccctcgcgaaccatgaacgttttacccgagccgccttcttcgccaggacaaccataaaagcgcaccgtgccgccttgcccatattgttccagccatttcttgacggctattgcagcggcaaaggcggcggttcccagcaaattgtgtccgcaaccgtgaccattttcaccgggcgtcacggatgtaggttgcgcgcaacctgcttgctgacttaaacctgccagggcgtcatattctcccagcagggcgataaccggtttgccttgaccaaacgaagcaataaaggcatttgggatattgcctacgttgcgggtaacggtgaagcctgcagattccagcgccgaagccagatgctccgctgaccagaactcttcaaaacgtgtttctggatgatcccagatttgatcggcaatatcggtataacgttggcgatcggcttcaatcgcatcgtcgataaaacgatagatttcctgcatcagatacctcgcgtccagggaaaattgagcgcggtgcgcgccagcgtttcgacggcaatagcgagaacctgctcgtcaaaatcgaatttttcgttgtgatgacctgccgccagctgtgtgccaaacaccacgtaggaggcttgcccttgatgttgctgcacgcgggccatcattaatgtggcatcttcggaacccgcaggcgcttcaacacgttcaatggcctgattgacccccgcgacctgagccgcctgactttgcaaccatgcgacccattgcggcgaaggagaactggcggtagctgcacccatcagacgagtttcaacgccgacaccatacatggttgctgcgccctgaatcgcttgttgtgcacggtcaaaaacatattgattaatgacgtcgctggccccgcgtgtttccactttcagcaacgccgaggcaggaacaacgttacgaccgcttcctgcctgcataacgcccacgtttactctggaagctccttcgctgtgcggggcgattgcatgcagtgcaagagtggcttgtgctgccgccaacaaggcattgtgaccgtcttctggttttgcgcctgcgtgagcggcggtaccggtgaagtgcgcgtcaaatttggtggttgccataaaattatcactgccgcacaccacggtgcccgcaggtacgccagtgccaatgtgcacggcagtaaaataatcaacatcatctacgacacctgcatcgaccatcgcccgcgcgccacgcgtaccttcctctgcaggctgaaaaatcagtttgatgacgccatgtagtccggactcgaactgtttaagggtatgcgccagcccaagcccaatggcggtatgtccatcatgaccacaggcatgcatcattccggcgttacatgacgcaaaaccgtcgcggtaggggcgatggctgacatcctgctcttcactgagatccagcgcgtccatatcgacacggaaagccatcaccggaccggggcgaccggtatccagggtggcgacgataccagtgaaaccaccttcaaaagccgcaatccattgtgctagcgcaccctgttgacgagcgcgctcgaattcgcgttgtagagtgaattcatcaggtaatcccatccggctactttcattaactacttcgcgacccagcgccagtgaatagccgagctggtgcaattcttccgcaacaagggtggcagtgcggaattccacccagccagactctgcatagtgatgaaaatcacgtcgccagtgcgataattttggggcaagcgaattaacaaattgattcaaagactccataacctttcccgtcatcagtaaaaagtgtgacccggttcacgtagcgatagtttttacttatcactaactgatttttcacagttttaaccgttcataaattaccctgacacaatcatctgcattaaagtagatgccagtttctttggtctgataaataacggttatcggtggcgtcatggcttttcaggtaaaaattcatcaaattcgggcttttgttgaagtggctcgtcagggcagcattcgcggagcgagccgaatgttgaatatgtcgcaaccggcactgagtaaatctattcaggagctagaagaagggttagcggcgcaactcttttttcgccgtagtaaaggcgtgacgttaactgatgccggtgaaagtttttatcagcacgccagtctaattcttgaagagctgcgcgcagcccaagaggatattcgccaacgacaagggcaactggcagggcagattaatatcggcatgggggccagtatttcccgcagtctgatgccagctgtcatatctcgttttcatcagcagcatccgcaggtaaaagtacgcattatggaagggcaactggtgtcgatgattaatgaattgcgtcagggagaattggatttcaccatcaatacctattatcagggaccgtacgaccacgaatttacttttgagaaattactggaaaagcaattcgcgatcttttgccgcccgggacaccccgccattggtgcccgttcgatcaaacagttactggattacagctggacaatgccgacgccacacggcagctactacaaacagttgagtgaattgcttgacgatcaggcgcaaacgccacaggtcggtgtagtctgcgagacgttctcagcctgtatcagtctggtggcaaaaagcgattttctcagcaaactgcctgaagaaatgggctgcgatcccttgcacggacaggggctggtgatgttgccggttagcgaaattttaccgaaagcggcctattatttgattcagcggcgtgatagtcgccagacaccactgaccgcgtcattaatcacgcaattccggcgagaatgcggctatctgcaaagttaaaactgcataaaaaaatagagtctgtcgacatccgccagactctacagtacacacagcagtgcatccgcgtcttaaatccggcattgtctcctctgcgccggtgactgtgttataacggttttaacctttagttgccaattttcttcagtgacagatttcacgaaaatataagttacattattaatatcgtgaatgaataatcatgcataagtattttgcttaaaatatcggcaatatttggaacttattactggaaatttgggtaatacgttgttggaccgacccggtctggttatcatatcgcgctcttaattgcgggaggatgtaacatgaaccttgacgacaaatcgctgtttcttgacgccatggaagatgtccagccgctgaaacgtgctaccgatgtccactggcatccaacgcgtaaccaacgtgcgccgcagcgtatcgacacgctgcagcttgataatttcctcaccaccggatttctcgacatcatcccactaagtcagccgctggagtttcggcgggaagggttgcaacatggggtgctggataagctgcgcagtggtaaatatccgcaacaggcgagcctgaatcttttgcgccagccggtggaagagtgccgcaaaatggtgttcagttttattcaacaagccctggcggatggtttgcgtaacgtgctgattattcatggtaaagggcgggatgataaatcgcatgccaatattgtccgcagctatgtggcgcgctggctgaccgaatttgatgatgttcaggcatattgcaccgcgctaccgcatcatggcggcagcggggcgtgttacgtcgcactacgtaaaacggcgcaggcgaagcaagaaaactgggagcgccacgctaagcgcagtcgttgatctcgagacgcatccgcggcttatgccgccagcacgcggttgcgtccatcatttttcgcccgatacaaagcatcatcaacgcgtttaaacagttcatcgatgctttcatttccttcgtgatgcgccacaccaatgctgacggtaaagcgtggtaagcccgaaatactcacttttgccacgcttacgcggatagtttcagccagcgaaagcgcggtatccagtggggttcttggtagcaataagacaaactcttcgcctccccaacgaaacaccaaatcgcctttgcgagcgcaactttcgagggtgcgggcgagggcgcataacacctcatcacctttagaatgcccatagagatcgttaatgtgtttaaaacgatcggtgtcgatgagcaacaagctgtaatcctgagcgatggcgagatgctgcatttggcctggttccgtaatgtgataaaactgtcgccgattcagtaatccggtcatcgcgtcatggtgagcagcatgttccagctgctcctccagccgtttttgctcagtaatatcatgcacaatacataacatgagcttgtcgccataaatttcaatcggtccggcataggtctgcacatgacgagtcgaaccatccgccagtttatgaacaaaattcaaaggtttatgaccaccgggtaaatgcgagatttcatgcatgataggcatgacgcgacgcccgagcatatttatttcccaggtatgtttctggcacatcgtttcatggttataaccatagaaattgagcgcggcgaggttagcatcgacgatttgtccatctcgtgacgggtcaatcaacaacattggtgcagagttagtcagaaaaaagcgcgcataaaaaccttgttttttgcgctgataatttgccgagcgactggcttttaaacccagcgttgccggcgcttcgataccttcgaaaataatcaccggttctgtttctgtcagctttcgcaaaacaagccgacagctcaatgctgtttcctcttctttacgctgaacagtgaggatttcgataatatcgtgttggttttgcagatcggagaggtatttcggcagttctttttgtgaggagacggaatagggtccggttcgtagctgactaaacgtgaggtcttgcatcaacagtttcgccgcgctattggcataaattaactgttcctcaaagggcgaaacgatccagacaggactggtgagtaagtccagggtattgaagttgtgcgtaatcattgagatcccgttatttttatcaatttttgttgctatccgatcgcaaaaaagccacgtcatatgatcagataattctgataatgatagacgctatttaacacttcacacggtttgtatacggaaaagcattttgctttttgtattcaatttagacagaattttattaatcatttcagggtaatggggtgatgagatgttgcgtaacagggccagaaggctagactacaaaataatgcgttgatgatggaggcactgtggaagcgattaagggatcggacgttaatgtcccggatgcagtatttgcctggatgctggatggtagaggcggcgttaaaccgctggaaaatacagatgtgattgatgaagcgcatccctgttggctccaccttaattatgtacaccatgatagcgcccaatggctggcgacaacaccgctgcttcccaataacgtacgtgatgcgctggcgggcgagagcacgcgtccccgagtcagccgtctcggtgaaggcacgctgattacattgcgctgtataaacggcagcaccgatgaacgccccgatcaactggtcgccatgcgtgtatatatggacgggcggttaattgtttcgacccgacaacgcaaagtgctggcgctggacgatgtggtgagcgatctggaagagggcacgggtccgaccgattgcgggggatggctggtggatgtgtgcgatgcgttgaccgatcattccagtgaatttatcgagcagctgcacgataaaattatcgaccttgaagataatctccttgatcagcaaattccaccgcgtggattcctggctctgctgcgcaaacaattaattgtgatgcgtcgctatatggcaccgcaacgtgatgtttatgctcgtcttgccagtgaacgtttgccgtggatgagcgatgaccaacgccgtcggatgcaggatattgccgatcgccttgggcgcggccttgacgaaatcgacgcctgtatagcacggactggcgtgatggcggatgaaatcgctcaggtgatgcaggaaaatttagctcgtcgtacctatacaatgtcgttgatggcaatggtctttttacccagtacctttctgaccgggttatttggcgtcaaccttggtgggatccctggcggcgggtggcaattcggattttcaattttttgtattctgttagttgttcttattggtggtgttgctttatggttgcatcgtagtaaatggttgtaacaaaagcaatttttccggctgtctgtatacaaaaacgccgcaaagtttgagcgaagtcaataaactctctacccattcagggcaatatctctcttgcaggtgaatgcaacgtcaagcgatgggcgttgcgctccatattgtcttacttccttttttgaattactgcatagcacaattgattcgtacgacgccgactttgatgagtcggcttttttttgcctgttatttatcagcgtctaccctttaagagtccacccaatgaccagagggaaatatgacgacacttatttatttgcaaattcctgtccctgaaccgattcctggcgatcctgttccagtgcccgatccgatccctcgcccgcaacccatgcctgacccaccacccgatgaagaaccgattaaattgtcgcatcgtgagcgtagatctgcgaggatacgcgcctgctaactttgcgtcgatgaccacgagaatagattgtgaccgctttttctaccctgaatgttttgcctcccgcccaactcacgaaccttaatgagttgggttatttaaccatgacgccggtgcaggccgccgcgcttccggcgatccttgccggaaaagatgttcgcgtgcaggcgaaaaccggcagcggcaaaacggcggcttttggcctcggcttgttacagcaaattgatgcgtcgctatttcaaacccaggctttagtgctgtgtcctacgcgtgaactggcggatcaggtggcaggtgaattgcgtcggctggcgcgttttctgccaaataccaaaattttgacgttgtgcggtggtcaaccgttcggtatgcagcgtgattcgttgcaacatgcgccgcatattatcgtggcaacgccggggcgtttgctggatcacctgcaaaaaggcacggtatcactggatgcgttgaatacgctggtgatggatgaggccgaccgcatgctggatatgggatttagcgatgccattgatgatgtcatccgttttgcgcctgcatctcgacagacgcttctgttttcggcaacctggccggaagccatcgctgcaatcagcggacgagtgcaacgcgatcctttggcgattgaaattgactcaacagatgctttgccacccattgaacaacaattttatgagacatccagcaaaggcaaaattcctctgttgcaacggttattaagcttgcatcagccatcctcttgcgtggtgttttgcaataccaaaaaagattgccaggctgtctgcgacgcgctgaatgaagtagggcaaagtgcattgtcattacacggcgatttggagcaacgcgatcgcgatcagaccctggtacgttttgctaacggtagcgcccgtgtactggtcgcgactgatgttgctgcgcgtggtctggatattaaatcgcttgagctggtggtgaactttgagctggcgtgggaccctgaagttcatgtacatcgcatcggtcgtacagctcgtgcaggaaatagcggtctggcgatcagtttctgtgctccggaagaagcacagcgggccaatatcatttctgacatgttgcagataaaacttaactggcaaacgccgccagctaatagttccattgcgacgctggaagcagaaatggcaacgttgtgtatcgatggcgggaaaaaagccaaaatgcgcccgggtgatgtattaggtgcactgacaggagatatcgggcttgatggcgcagatattggcaaaatcgccgtgcatccggcgcatgtctatgtcgcggtccgtcaggctgttgctcataaagcatggaaacagttacagggcgggaagattaaaggaaaaacgtgccgggtgcggttattaaaataatgaaatgttgaattgccgggtgcaagagtaaacatcttattcgggattgccggatgcgacgctggccgcgtcttatccggcctccataagagtagcccgatacgcttgcgcatcgggcgctatcctggttatttcacttcaaccacattcagccgtaactcatccaactgattttcatcttcttctggctgccagcacgccggttgtagtgggatctcttcgcgatcaaacgccagatcacccccgttaaccacttcagaaccgtgggtgatgcctttgaaatcgaacaggttggtatcgcacagatgcgacggcaccacattctgcatcgcgctgaacatcgtctcgatacgccctggataacgtttatcccagtcacgcaacatgtcagcaatcacctgacgttgcaggttaggctgtgaaccgcacaggttgcacggaataatcgggaacgcttttgcatcggcaaatcgctgaatatctttctcgcggcagtaggccagcggacgaataacgatatgtttgccatcatcgctcatcagtttcggaggcatacctttcatcttaccgccgtagaacatatttaagaacaacgtttgcaggatatcgtcacgatggtgacccaacgcgatcttcgtcgcccccagttccgttgcggtacgataaaggataccgcgacgaaggcgagaacacagtgagcaagtggttttgccctctggaatcttctctttcacgataccgtaagtattctcttcaacaatcttgtactcaacgcccagcttttcaagatactcgggcagaacgtgttccgggaagcccggttgcttttgatcgaggttaacagccaccagcgaaaaattgattggcgcgctttgctgcaaattgcgcagaatctccagcatggtatagctgtctttacccccggagaggcaaaccatgatgcgatcgccttcttcaatcatattgaagtcagcaatggcttcgcccacgttacgacgcagacgtttttgtaatttgttcaggttgtattgttctttctttgtaatttgttgattttcttgcattatttcagttctctggtactaaatggggcaaattgggggcaaactttgcaactacgataaccgcgcattcaacatggctatctgttcgtcgttcatgtcatcaatccacataccgtaaatttcatacaccatctgcgcagtttcatgccccatttggctggctataaatgccgggttcgctcctgccgtcaacagccagcaggcaaaagtatgccgcgtatggtacggattacggcggcgaataccagcacgttttactgctgcattccaccttgcccccaaactgcttaccgagtaataaggtttttgttttccgttacacaccctgggcatgaaaacaaaatgcagtttttgcttttcggttctgccgtactcccgatgataaaaggtgatttcgcttttgcgatgatgcccggtcagtttgtattgctccttcagtgcttcaagagcaggctgcagtagtgttactgttcggatcccggcatttgtttttgggggaccgaacatatcaagtatcgtcaggtttcttctgacattcactattcccttttcgagatccacatcctcccacgccagagctgccagttccccgtgacgaagtcctgagtaaacggcaaatttccacaagttctggctctgtcctttttcactttccattaatgcattgaattctgttttagataacggatcaggctttattctgtttcgctgtaatttttttactccttcaaatggtttggttgatataaatcccgactgatacgcaaaacgcaacagcgaacagagcagggcgatatagttatcaactgtgcgcacggttcttccttttttgttggatcttggattatccaggtaaagcgtttctccatgcagcagttcattccggtagtttaagatatcgctataacgaatatgtgatatcggggtactttcacaaattattattctaagtgtttttaattgtgatttcgttttcttcattgtgtttgttgttaactctgtctctttaatttttgtccagatatcacaaagctctccgaacgtttttatgactctcgttgtcaccatttttgccccagtgctggactggggaaaacgtcttaaatactcaaattcaccggagtttatttcatgaactatcagcgctcttaaatttccggcctttttaatattactgtttgtaatctcccagccttttaatgtttcccgacatcgttttcctcgaaacatgaaccagatgcgaatgtatctacctctaatctcgacacctgttggtaatttagacatatcatgagtctttgataaactgatttatctttggatagttgtaccagataatccctcgtttgctgtctggcttacctaaaggagatactcgtttgaagtggaagccctccacccaacagttctggcggtatgcttcaatttgtctggcccccagaccagtgcgaagcatcaggccgtattcaaccatccactcttcattaaagattacttgtgccatcgcatcacctctggcaggcgccaatgttagactgaaattgacgcccgatgttgattattaataatcagctatgaagttttaatttgaatacaatgcaattctcgaggactgaagtttctcgcaattaaaatttatcagttttactttctgctctctggaaacgcctgcttcttttttacctgagagcattttttcgcattctgatttcgttagtttagattttgaatatcttgtccagttagtaggagtgccaccttccttttcaatagtggcggtaattttatacatgaacacctccattattatttccagtggttcgtttattccatctttcgagtgcttctttttcacttccaccataaccggttcgggattcgcatccgttacacttcgctcggtaatatcctgaaatggctttcaccgttactgatggacaaccacaaaatggacatggtttaacattgtcatatctcataatttttctcataaaaaatatttcaagttggcggtgcattacaccgccaggctgaattattcctctgaattatcgattacactgtattccccggttaatacagaggaatctgcaggatcgattgtcagtggttccttttcatccattgatactgcacgctggatctcaattgatacgggcaaatatttgaacaggcgacgaatagccgttttctttgccatttcttcccagtgagttacccacggcccgttattaccagctttactcaggctgcgcaccagctcaatctgtttgcgcgtcataacttcaaactgagtacctccgtctttcagtcttgcgacagcatagacgtgggtaaccggggcatcttcgttttctcccgggcggtgtattaacttttcatcaaggccaaattcgaagctaaactcgtcaccttcacggacaacacgggctgacaggctggcgatttgaccagaacggcgagccagatcaatcatgccgcgatagccaatgattagctgaacgttctttttaccgctcttttcgtttttattaccaaaaggcagtaaatatgcatgaccgagggcgctacctggctcaagtccgagctgtgaacactgtacgatcgcactgacaaaactcatagtgtcacagtttcctaacgccggaactttacgaatttctgtggtggcgatacggatcatacgttcagccgtcatatggcgtggaagagctgctgccagttgctctttcattgatggctggttaataaaactaatcacgtcgctatttttaactgctgctggtgcacggtttccctgagttttttgcagatcggcttttgcgattggtggttgcttagtcatttgcatattccttagcccagcggggcagtgataatgtcttaatagctggccattcatcggtattcaggcagtcagacagggttcgcagattgcggtgatattcctgttgacctgccagttttgcttcttcgcccatcatgaaaatttcaaccggataacgtccgcattcaatagttgtgctggcaaccagaaaaacgaaagttggctgcactccaaactgtgcttcataaccgtcactgtagaatgcatcctgaacgtgatagcggtagtcgtaataagcggttttgaatcgttgaatatccgccgtagttttcacgtccatgatccagtgaaattcagggataattttgtccggacggcaccgacacaaaattcctgtttcaggatcttcccagtaaattgatgattcagcgtgtccggcgctttcaacaagccattgccccagcggcaaagccataacgctttgatacatgagttcaattttccggccttcttccgcagtgataaccgtttttcctgtgcttgcgcattccatcagaaacgctttctcttcttcttttccggcgtttgtacggcggttaaattcaggtgctacgataaagcggttactgaattcttccggttcaagtacccggcagtggaaagcagttcctaaatcgagcgtttttgtctttgtggtgtccacgggggcatttttacgccacaaatatagtgccggagtatcagcaatgtcatcgagctgagacttactgataccgggacccgcgtggtaattctcattcgaaattccgtaataaatacctggctctatgtcttctacgattacgggatctgcgacttcgccagtttcatcactgcaatcgcgatgcggatcgctgccagcattctcattgtgcggatgttcagcgccttccatttcctccggatcattttccttagcttcaacctgactctcttcatcgaatgtttcctggtatgttgcgtcgcccatcaccgcaccacagtcagggcagttatccccgccagtctggccgcaggcattgcaggctatttccggttcctgttgcactactggctcaggttgattcatatctgggctggttttttccgtttctggctggttctggtacacacaatcgcgagtctggatcccctttacccatttcggatcgttcgggtcgctaattccgtcaacaaattcaccacgtgatgcagcaagcaatttatcgtcatcgacaggattttttgatggaatgtttttccgggcttcatggagttctgcccgcagttcctgatatttcgcatcaacagaatttacctgtgactgagcatccagcggctgcgtgtcctgatgatgttcagttgcgtccggttccattgtttcagcctctccctgttcaactgccgttgttccagatggttgcggtttttcttcatcatcctgttttccttcttctgttactcgctgcggcatcggggcagaggagcgaccgcaggcaatatccacgatttccggatcagggttggcatgatcggtttcagtcagtactttgttcagatattcagtgacgtgcgcggggatgacctcgatcccaattggtgcttcttttacggacgcaaccacgatggcgcgggaataatccagcccgccaggcatggtgatgaatttgtcgcggaaaacagaaaagggcggtttattttcagcgataatttcctcaatgcgtttagcgtgtgccggatgaaggttatagatgtccagatccattgaacgggccagtacgccagtggctacgtcgcgcgccagtgacgtcagatcgtgtacgaaaccttcgccgcgatcggtgaggtttccgccgccagcattagcaccggaagccgtgcgagtgatgtgtgaaacacgattacccttcatccactcttttgtcagcagtcctcgatcggtgtagtcagcgttcaggtatgcttcgaaaaaagcagttatcagtcccaggtttgaattaccaggattagggaaaactttgtcagtgtcacgaaccagtttgtggagttcgcgaatttccagcgggtcgagcaggctggttttgtgggaaacagccagggcagtaacagccggtagttcttcagcccgagcaatgtgtaatgcctggagtccgtcgcgtgaaacgtgcgttaccggtttttcgctgccgtgttgagcaagccaacgaatgggcagttcctggccagaaattgggagtagcatattctcctcaatctcagtcatgtcttcgccgttgacgttggtattgccttgatagtgagcgttgtctggtgctgctcccggttttagttcccatgtcatggagtctttgctgagttgatagcgttcactccaggtaaaatcgatctcaccttcagcgggcaggtcattaacgacaggaaaattcgtggcaacagctttaaaatagctgctcagttttttacctgacttaacgatcaggtagtccagagtggcacaggtcgattcaaaatcgttgcttgcccacaggacgacgtcaggttcaccggatgattttttcgctttccgtaacaggaagagtggttttgtgctcattgttttttaacctcaactcagattaaaattcgttttgttcagtgaatgatcttgccggatacacactgttcatagcctgcgccatacgcaggctatttctttcagatttcaccttttaatttcattgcaattagagttgccagaaattcggcttttttttctgcgggcagattctttccgatatgcaccaggcacatttttttgacaccttcatcaagtgtttttacgttgcctgatggaccatcgatatcaaccacagtgaatggggtttctttattttctgttttaattacgtagccaatgcgctttccttccagattcacctcgtgaacaatgtcatcggtagttacaacagtggcttcataattggtaatcatgtttttctccttaattaaggttgagcgaatacctgccatttctggcataaattcagtttcgaatagtcaattaattaaagttcatgtgccatctggtctttttcggcacaagcttcactgcaatattttctcggttcgtcttttgataaaatcccgtgcatgaagtgaagcattctttcaatagctttgctttcttcaacgtcttttttgcaaaggtggtaagcacattttattttcttagtcatcaccatgactccgcctttacaggtaaaccatcacgaccgaggaagactttaatcatgcggtcagtaatgaatgtttttgtggtcaggttacgaatatatagttttcgctttttaatattgtttgccgaggcaatatatgtccggccttcatgaagaacataatcgccaggagtcacacactgacgtggtatttcatcagttccgaagtgatgtgcaatcataattatctccatttttacaaatgaactttgttgatgcggtgtctggtgcctccaggtgactgcaaccagttaacaattacagtcggctttcccacccaaaccaataaggactaacatgacttttaactgtgccacgtgcgcttagccgcattcaccgcatcacaaaattcactttaaaaagggcggacatcagccgaacttcaagaaaaaaactgatgccgccaggactacacacagcaatgtcgttatttacaaccggaggcgcactcccaccatttaaatttaacagacaagaccgactctttatggatatcggaaatgcgccttcgtgttgtgcccggttttatttcaccacctccgggcttcggtggtctcggctatacccctacagcgagagcttgtgttaacatttcaatacccttacagttgagagttattgatatgttggatgtatttactccattgttgaaactttttgctaacgagccactcgaaagacttatgtatacgattatcatttttggtctcactctctggctgataccgaaagagtttactgtcgcattcaatgcttatactgaaataccttggctctttcagattatcgtttttgccttttctttcgtggtcgccatttccttctcaagattgcgagcacatattcaaaagcattattcattactaccagagcaacgagtattgcttcgtttatctgagaaagaaatcgctgtatttaaagatttccttaaaacaggaaatcttattatcacttctccttgccgtaacccggttatgaaaaaattagaacggaagggcatcattcaacatcagagtgatagcgcaaactgttcttattatctcgtcaccgaaaaatactcccattttatgaagttattctggaacagcaggagtagacgttttaatcgttagcttactgtgtgcttctccaaccatcggcgcgcaccagtttcggttttaaatgttttgcttttggtatacgtcatggcagtgaacgttccatcctggttggggaacacgccgcacaccagggattcgttgttgccgaggtcgattttttgcattttgcgaatctcacatcttgttgctacgtatagcgacttctgcctgccagagatcccagtcgttgctgcgtaaagcctgcacagcctggttgtaagtgataccgcaacaatccatcaaatactgaactacttcgtaatgcaccatcttatctctccccttaacgccgggtggcggaactaactgctgcactgcaaaatttgaatcccgccgtcatgttcatacgcctcgggctggctacttaaccccttaccactgcctggtaactcgaagtattgcccggcgttctgtggggcggggtgggtggtatgctggaactataggtaatgcctaattgattgtcaataggctatgcctaatgttttgagcgtaacctaataggtgatggcgacagcagaaagtgatgggggggttaaataacggaatccaggagttttccgtcagaccatataagtttaagttccagtttttgtgatgttctggcttttccgttcagattcaagagctttcagatacttacccactttcatttccatcgctgctatgtaggcgcgaacatcgtggtcaacccaatctggttctgtagcatttccagataacaggaaagctacaatcgctcttatttcatcagaggctgcttgataaaggttgtttatatctaaaagttcactttttgtatctgaattggtgggggttggtatggggtattcgttaagcccccaatgctctggaccaacaacatcagaaaagaaacgccataattctggaagtttatctttacttatagagcctttcttaatccagtcataaattgatggtggttggactttaaagtggcgtgcgacctccgcctttgatttgacggatcccgatgcgatttttttgttaatggcctgctctatcgctcggcctaagtctttaccactaagcattgcttaatattctcctatgcgcattacattaggcaatccctacccttactgcattaggcacagcctattgacaattgcgttaggcgtcgcctaatatttctgtgtgtttttggagttcattcgatgaaaaaagagaactattcattcaagcaagcttgtgctgttgtcggtgggcaatcagcaatggctaggcttttaggtgtatcacctccaagcgtaaatcaatggatcaaaggggtacgtcaattgcctgccgagagatgtccagcaattgaacgtgcaacaagaggtgaggttctgtgcgaagaacttcgtcctgatattgactggtcatatttacgacgttcggcatgttgttcgcagaatatgtcagtgaagcaactaaatgacagtaacaaatcctcatttgatcatacctgaaacatcaagaggcaaatgattcatgaaaatcaagcatgagcacatcgaatcagtgttgtttgccctagcagccgaaaaagggcaggcatgggtagccaatgcaattactgaagaatatctgcgccaggggggcggcgaattgcccctggttccaggcaaggactggaacaatcagcagaatatctatcaccgttggttgaaaggtgaaacgaaaacgcaaagagaaaaaattcagaagctgatcccagcaattctggcaatccttccgcgcgagctgcgtcaccgactctgcatcttcgataccctggaacgccgtgcattactggcggcgcaggaagcgttaagtacggcaattgatgcgcatgatgatgcagtccaagccgtttaccggaaagcgcatttcagcggcggcggttcttccgacgattctgtcattgttcattaagcaaaagtttccatgctgtttgtgcttattctaagccaccgggcagcatcatacggggcaattatggccgcattaccatacatgcaactgtacatagctgattacctggctgacaccatgcatttgtcagcagaggagcatggtgcgtatttgttgctgatgttcaattactggcaaacaggaaagccaatacctaaaaacaggctggcaaaaattgcccgtctgactaacgagcgatgggctgatgttgaaccatccttgcaggagtttttttgcgataacggcgaggaatgggtgcatcttcggattgaggaagatctggcatcagtcagggaaaaattaaccaaaaaatcagccgcaggaaaagcatctgttcaggccagaagaagcagaaaggaagcagatgttcaaacaaaacaagagagaaatttaacaggtgttcaaacagatgttgaagtggtgtttgaacatgatgtcaacacaaaggcaactaataaagatacagataaagatctaaaaacagatccccccctaaatcccccccgggggaatcgaggtgtcaaaaagtttgaccctctggatattactttgccgaactggatttctgtctcgctttggcgtgagtgggttgaatttcgccaggcattgcgaaaaccgattcgaacggagcagggcgctaacggggcgatacgggagctggaaaaattccgccagcagggtttttcacctgagcaggtgattcgacacagcatcgccaatgaataccagggcttgttcgcgccgaaaggtgttcgacctgagacgttactccgacaggttaacaccgtctcgttaccggatagtgcgatcccgccaggcttcagggggtaactgaccatgaaaaatattgcgacaggcgatgttcttgaacgtatccgcagactggccccgtcacatgtaaccgcgccattcaagacggtagcggagtggcgcgagtggcaactttccgaaggccagaaacgttgtgaggagatcaaccgtcagaatcgtcagttgcgggtggaaaaaattctgaatcgctctggcatccagccattgcaccgcaaatgctcgttttcgaattaccaggtgcagaacgaagggcagcgatacgcgttgagtcaggcgaaatccatcgctgatgaactgatgaccgggtgtacaaattttgcgttcagcggaaaacctggtaccgggaagaaccacttagcggcagctatcgggaatcgcctgctgaaagacggtcagacagtgattgtggttaccgtggctgatgttatgagtgccctgcacgccagctatgacgatgggcagtcaggcgaaaaatttttgcgggaactgtgcgaagtggatctgctggttcttgatgaaattggcattcagcgcgagacgaaaaacgagcaggtggtactgcaccagattgttgatcgccggacagcgtcgatgcgcagcgtggggatgctgacaaacctgaactatgaggccatgaaaacattgctcggcgagcggattatggatcgcatgaccatgaacggcgggcgatgggtgaattttaactgggagagctggcgtccgaatgtcgtccagccaggaattgcgaagtaatttttaccgggagaaaaatttaatggagactgtttttgacgcactgaaagcaatgggaaaagccacatccatagaacttgctgcgcgacttgatatcagtcgtgaagaagtgctgaacgaactatgggaactgaaaaaggctggttttgttgataaaagcgcgtacacctggcgtgtggctgataacaatgttcagcaggaacagccagcgcaggcagaactgccggaagaaatcaccacagcaacagtagcgaaaatctcagagtgcgatttaaccgcgacgattgaacaacgaggaccacaaacggctgatgagctggctacattgtttggtaccacatcacgcaaagtggcttcaacgctggcaatggcaatcagcaaaggtcgtctgattcgcgtaaatcagggcggtaaatttcgttactgcataccgggcgataatttaccagcagagccgaaagcagcatcggtatctccgctctggttatctgcatcgtcgtctgcctgtcatggggtgttaatcattaccgtgataacgccatcgcctacaaagaacagcgcgacaaaaatgccagagaactgaagctggcgaacgcggcaattactgagatgcagatgcgtcagcgtgatgttgctgcgctcgatgcaaaatacacgaaggagttagctgatgcgaaagctgaaaatgatgctctgcgtgatgatgttgccgctggtcgtcgtcggttgcacatcaaagcagtctgtcagtcagtgcgtgaagccaccaccgcctccggcgtggataatgcagcctccccccgactggcagacaccgctgaacgggattatttcaccctccgggaacgactggtaatgatgcaggcccaacttgaaggtgctcagcaatacataaccgagcagtgtttaaagtaaaatcttaactacaatatgattcattttgatgattgtttcataaggaacagtgaagtaagatctaagaggagttaaattttatacagtataatcataatattgcagcaaggtggttataattgaaagaatatttagatatgaatacatctcatgtaagagttgttactcatatgtgtgggttcctggtttggctctatagtctttcaatgttgccaccaatggttgtagcattgttttataaagaaaaaagcctgtttgttttctttataactttcgttatatttttttgcattggtggcggagcgtggtatacaactaagaaatctggcattcaattacgtacccgtgatgggtttattataattgtaatgttttggattttgttttctgttattagtgcattccctttatggattgactcagaacttaatttaacgttcattgatgctctgtttgaaggggtttctggaataacaacaacaggagcaactgtaattgatgatgttagttcattacctcgggcatatttgtactatcggtcacagttaaattttataggtggtttaggagttattgttctggcggttgctgtattgccattattgggtattggtggtgcaaagctttatcagtcagaaatgccggggccatttaaggatgacaaactcactccccgcctggccgatacgtcacggacactgtggataacttattctttattaggtattgcttgtattgtctgttatagacttgcaggaatgcctttgtttgatgctatttgtcacgggatttccacagtttcgcttggtggtttctcaactcatagcgagagtatcggatattttaataactatttggttgagctggtggctggttctttttccctgctatcggctttcaacttcactctttggtatattgttattagcaggaaaacgataaaacctttaatcagagatattgaacttcgtttctttctgttaatagccttaggggtgatcattgttacctctttccaggtctggcatataggtatgtatgacttgcatggaagttttattcattcgttttttcttgccagctccatgctcactgataatggtttagctacgcaggattatgcaagttggcccacgcacacgatagtgtttttgctgttgtcaagtttctttgggggatgtataggttcaacttgtggtggaattaagtcacttcgatttcttatacttttcaaacaaagcaaacacgagataaatcagctttctcatcccagagcgttgttgagtgtaaatgtaggagggaagatagttacagatcgtgtaatgaggtctgtatggagtttcttttttctttatactctcttcacggtgttttttatactggtgttaaatggtatgggatatgattttcttacatcatttgcaacagtggctgcatgtattaataatatgggattaggttttggggctactgcatcgtcattcggagtgcttaatgacattgcaaaatgcttaatgtgcatagctatgattcttggtcgccttgaaatttatcctgttattatattgttttcaggttttttttggcgctcctaatatatggctgatttataattgtgagtttaatattatgttgactcactcattgatccaatacctaactttaccagcaacacctccgtccccagtagcactggctgctggggtgcgttttattcataaagcaaggctgtatgagcgagaaattaaagatagtctatcgcccattacaagaattgtcaccgtatgcgcacaacgccaggacgcacagtactgagcaggtggcacaactggtagaaagtattaagcaattcggctggactaatccggtgctgattgacgaaaagggcgaaattattgcgggtcacggtcgtgttatggcggctgaaatgctcaaaatggattctgttccggtcattgttctgtctggcctgacggatgagcagaagcagcgataacgatcagtatcgctcccgtaatgcattaatccgtcgccacattgagaaaatggatgccagtttgcacgtcggaacgaaggagtttgatatttcaaaggtttccgaggtggattctgttgatgatttactcattgataatgccgctcgttatctgctgaaagactggaaaggggttggtgaactggttaatggtgttgaggttgcactggaatatacggcagaacgagggatcgcgctgcttaagcagaatccagagttgtactggcagatccttgcagaagcagccagcatcgcccagggtaaagagcagcagaagcaggatacgataaaaaagccatagctgcccagcggtggttatcggagttcgggggagaaaggggggaaaaggcaagatggaagcgagaaaaactcaggttgccaccgataccggaaccagaaatagacccggtgcttaaggagttgttgtacgcctattcggtaatatcccgtgcccgacgttatgctggaatggctggggtgcctttgcctttatctctgacagagataaatgaatatttagccactcatccggtattgattgagcgcgatgaatttgaagcagtgatctttgcactggatgaccagtattttcaggagcagtgtgtgtagttgttaattacgtacactctgttacagagatgtgatggtgtctttaattaaatcgatgatgctcctggagaaaagcattgcgtggcctcgtaatcgctatatctactattatgtcgcctgaaacccacttcgcggtgggttttttgttgtcaggagttttaataaatggcagagcaaacctcgcgtctcgcaataattattgatagcactggagcgaaaaataatgctgacaatctgacctcctcattagtcaaaatgacgcaggctggggaaactgctgcaaatagcgcagggaaagtgactaaggcaacagaagatgagaagaacgcgctcgcaaaattaaaagcagctattgatccagttggtgccgcaattgatactgtcggtcgacgctattctgaattaaagaaatttttcgataaagggcttattgataaagaagaatatgaatttcttgtccgtaaacttaatgaaaccacagaggaattgagcggggttgcgcaagcgcagagagaagccgagaaggccggaaaacttgctgccgctcagcaggaagcgcaggctcaggcctttcaaagaatgctggacaagatcgaccctctggctgcggcgctaagaaatcttgaacaacagcatgatgaacttaatgctgcgtttgcatccgggaaaataaatggttctcagtttgagaattatagccgaaaaatacaggaaacacggcgagagcttaccggagaggctcaggcagagcgagaagcagcaaaagcgcatgatgaacaggttgttgctttgcaacgtctgattgctcaacttgatcctgtcggaactgcttttaatcgtctggtagaacaacagaaacagctcaatgaagcaaaagctaaggggatgctttctcctgaaatgtatgaggagctttctggaaaacttcgtgctatgcggagtgagcttgaggttactcaatcacaattaagcaaaaccggaatgtcggcaaaacaaacggcttttgctatgcgcatgttgcctgcacaaatgacggatattgttgttgggttgtccactggtcagtcgccatttatggtgttaatgcagcagggcggccattcagctatgcaggagacaagaatcgccagcttacccgttacagcgatacccgctggcatgaagattccgtgcgtaaccgctggttcagcgtgatggtggggccgtctgtgcgcgtgaatgaatggttcagcgcgtatgcgatggcgggtatggcttacagccgtgtgtcgactttctccggggattatctccgcgtaactgacaacaagggaaggtgcgaataagcaggtcatttcttcccaagctgactcgctgattaaaatttcgcggatctgggccgatttttttcccgcaaacacatcgaatcagcctatttaggctattttttccaccatttctggcgttatttccggtttttactgagatctctcccactgacgtatcatttggtccacccgaaacaggttggccagggtgaataacatcgccagttggttatcgtttttcagcagccccttgtatctggctttcacgaagccgaactgccgcttgatgatgcgaaacgggtgctccaccctggcacggatgctggctttcatgtattcgatgttgatggccgttttgttcttgcgcggattctgcttcaaggtttttaccttgccgggacgctcggcgatcagccagtccacatccacctcggccagctcctcgcgctgtggcgctccttggtagccggcatcggctgagacaaattgcttctctccatgaagcagattacccagctgattgaggtcatgctcgttggccgcggtggtgaccaggctgtgggtcaggccactcttggcatcgacaccaatgtgggccttcatgccaaagtgccactgattgcctttcttggtctgatgcatctccggatcgcgttgctgctctttgttcttggtagagctgggtgcctcaatgatggtggcatccaccaaagtgccttgggtcatcatgacgcctgcttcggccagccagcgattgatggtcttgaacaattgacgggccagttgatgctgctcgagcaggtggcggaaattcatgatggtggtgcgatccggcagggcgctatccagggataatcgggcaaacaggcgcatggaggcgatttcgtacagggcatcttccatggcaccgtcgctcaggttgtaccaatgctgcatgcagtgaatacgcagcatggtctccagcggatagggccgtcggccattgcccgccttgggataaaacggctcgatgacagcggtcatattctgccatggcagaatctgctccatgcgggagaggaaaatctcttttcgggtctgacggcgcttagtgctgaattcactatcggcgaaggtgagttgatggctcatgatgtccctctgggatgcgctccggatgaatatgatgatctcatatcaggaacttgttcgcaccttcccaaggggaaaacgcacgacgtgctgaccggaagtgatgacggtcgccacagcaacacgtctctggcgtggggagctggcgtgcagtttaacccgaccgaatccgtggccattgatattgcttatgaaggccccggcagtggcgactggcgcactgacggtttcatcgtgggtgtcggttataagttctgattagccaggtaacacagtgttatgacagcccgccggttcaggcgggcttttttgtggggtgaatatggcagtaaagatttcaggtgtactgaaagacggcacaggaaaaccggtacagaactgcacaatccagctgaaagcaaaacgtaacagcaccacggtggtggtgaacacgctggcctcagaaaatccggatgaagccgggcgttacagcatggacgttgagtacggtcagtacagcgttattctgttggtggaaggattcccgccgtcacatgccgggaccattaccgtgtatgaagattctcaacccggtacgctgaatgattttctcggtgccatgacggaggatgatgcccgtccggaggcactgcgccgttttgaactgatggtggaagaggtggcgcgtaacgcgtccgcggtggcacagaacacggcagccgcgaagaagtcagccagtgatgccagcacatcagcccgtgaggcggcaacccatgcggctgatgctgcggactcagcacgcgcagccagcacgtcagccggacaggccgcgtcgtcggctcagtcagcgtcttccagcgcaggaacggcatcaacaaaggccactgaagcatcaaaaagtgctgccgctgcagagtcctcaaaaagcgcggcggccaccagtgccggtgcggcgaaaacgtcagaaacgaatgcttcagcgtcactacaatcagcagccacatctgcatccaccgcgaccacgaaggcatcagaagctgcgacctcggcccgggatgcggcggcctcaaaagaagcggcaaaatcatcagaaacgaacgcatcatcaagcgccagtagtgcagcttcctcggcaacggcggcaggaaattccgcgaaggcggcaaaaacgtccgagacgaacgccaggtcttctgaaacggcagcgggacagagcgcctcggctgcggcaggctcaaaaacagcggctgcgtcgtctgccagtgcagcgtcaacaagtgccgggcaggcctcagccagtgccaccgccgccggaaaatcggcagaaagcgccgcatcgtctgcttcaacagccacaacgaaggctggcgaagccactgaacaggccagcgcagcagcgaggtctgcttccgcagcgaagacatccgaaacgaacgcgaaagcgtcggaaacaagcgcagaatcctcaaaaacggctgccgcatcgtcagccagttcggcggcgtcatcggcatcatcggcgtctgcttcaaaagatgaggcgaccagacaagcgtcagcagcgaagagcagcgccacgacggcatccacgaaggcgacagaggctgctggcagtgcgacggcggcagctcagagcaaaagtacggcggaatccgcggcaacgcgcgccgagacagcagctaaacgggcagaggatattgcatccgccgtggcgcttgaggatgcaagtacgacgaaaaaggggatagtacagctcagcagtgcgaccaacagtacgtctgaaacgctggcggcaacgccaaaggcagtaaaatcagcctatgacaatgcagagaaacgtctgcagaaagaccagaacggcgctgatatacccgataagggatgcttcctgaacaacattaacgcggtcagtaaaacagactttgctgataagcgtggtatgcgttatgtgcgggttaacgctcctgcaggtgcaacatctggaaaatattaccctgttgttgttatgcgttctgctggctcagtaagcgaactggcatcaagagtcattatcaccacggcaacgcgaaccgcaggcgatccgatgaataactgcgagtttaacggatttgttatgcctggtggctggactgacagggggcgttatgcttatggcatgttctggcaatatcaaaacaatgaacgagccattcactcaataatgatgagtaataagggcgatgatttgcgctctgtgttctatgttgatggcgctgctttccctgtttttgcgtttattgaagatggcctgtcaatatccgcacctggtgctgatctcgttgttaatgatacgacctataagtttggggcaacaaatccggcgactgaatgtatcgcggcggacgttatccttgattttaagagtgggcgtggtttttatgagtctcattcgttaatcgttaacgataacttgtcgtgcaaaaaactttttgccacagacgaaattgtagcgcgtggtggtaatcagattcgaatgataggtggggagtatggtgcattatggcgtaatgatggcgctaaaacttacctgctgcttaccaatcaaggtgatgtttatggtggctggaatacattaagaccgtttgctattgataacgcaaccggcgaactggttattggaaccaaactgtccgcaagtctgaacggtaatgcattaacagcaacaaagctgcaaacgccaagacgggtttctggtgttgagtttgatggttccaaagatattactttaaccgccgcgcatgtggctgcttttgccagaagggcaacggatacatatgccgatgcggatggtggcgttccatggaatgccgaatctggcgcttacaatgtcacccgctctggcgacagctatattctggttaacttctataccggagtcggaagttgccggaccctgcagatgaaggcgcattacagaaatggtggtctgttctaccgttcttcaagagacggttatggttttgaggaagactgggcagaagtttatacctcgaaaaatcttccaccagaaagctacccagtcggcgcaccaatcccgtggccatcagataccgttccgtctggttatgccctgatgcaggggcaggcttttgacaaatctgcttacccgaaacttgcagccgcttatccgtcaggcgtgatccctgatatgcgtggctggacgattaagggcaaacctgccagtggtcgggccgtattgtctcaggaacaggacggcattaaatcgcatacccacagcgccagcgcatccagtacagatttggggacgaaaaccacatcgtcgtttgattacggcactaaatccacgaataacaccggggcacatacacacagtgtgagcggctctacaaactcggctggagcacacacacactcactagccaacgtgaacacggctagtgctaactccggtgctggtagtgcatcaacaagattgtctgttgtgcataatcaaaactatgcaacatcatctgctggcgcacatacccactcactgtccggcactgctgcaagcgcaggtgcacacgcgcatactgtcggtattggtgctcatacgcactccgttgcgattggttcacatggacacaccatcaccgttaacgctgctggtaacgcggaaaacaccgtcaaaaacatcgcatttaactatattgtgaggcttgcataatggcattcagaatgagtgaacaaccacggaccataaaaatttataatctgctggccggaactaatgaatttattggtgaaggtgatgcatatattccgcctcatacaggtctgccagcaaacagtaccgatattgcaccgccagatattccggctggcttcgtggctgttttcaacagtgatgagtcatcgtggcatctcgttgaagatcatcggggtaaaacggtttatgacgtggcttccggcaacgcgttatttatttctgaactcggtccgttaccggaaaatgttacctggttatcgccggaaggggagtttcagaagtggaacggcacagcctgggtgaaggatacggaagcagaaaaactgttccggatccgggaggcggaagaaacaaaaaacaacctgatgcaggtagccagtgagcatattgcgccgcttcaggatgctgcagatctggaaattgcaacggaggaagaaatctcgttgctggaagcatggaaaaagtatcgggtattgctgaaccgtgttgatacgtcaactgcacaggatattgaatggccagcactgccgtagggtaaaacatataaattctataattagatgtatctttccatttacggcaaggaagggggcttggaagacgtaaagcatctcacaccgagattattttttatatgtcaggtgtctgaagttttgctttggctcttaaaatggtttgccgcgaggttttgaattcccgggcaatggcacttatacttacacctgacttaattcgttcgaataccacctgtttctgttcttcatttaacacaggaggtcgaccaaaacgtttccctgcgccgcgggctcttactatcccggaatgagtgcgttcaagtaaaaggtctcgttcaaattcagcgactgctgaaattacttgcatcatcatttttcctgttggactggtcaggtcaatgccacccaatgctaagcaatgcactctgatacctgtttcggtcagttgttccactgttttcctgatatccattgcattacaaccaaggcgatccagttttgtcacaatcaattgatcaccacatttcaggcgagcaagcaaccggttaaaaccaggacgctcactggttgctgctgagccgctaatgtgttcttcgattatttgctgaggtttgattttaaaacctgcactttcgatttcccggcgttgattttcggtggtctgatccagcgttgatatccgacagtaagcaaaaattcgagacatagtgagactctatacgaaattggtgttcatatcataatgcatctcagaaaataattatgattatttttgtgcatatttgtatgtacacgttcgaaaataaacgaatgcgtatgcaaccccgtaattttggtgagacccaaaatcgattttgtgaaaaatggctttaactcggtttgtttttcgagttccgggcggactcaaggaagaagaatagtgttgcgtgttattttaaccagatttcaagttgtttggtcgtggaaaagtggagcaaaatgttgttaaagtggaaaaatgataaaaaagtaagtttattatattacattttaccatttaaattttggttgtctttaagaactgatatcgctgtttgtaataattctttgttatccagccatgatgttttctttatgtttccttcaatgtaatcaagcaatgttctggtattgataggtcttccctgttttgctacttccactacagcatcccctaggataattcttacttcaggaagctgcgcagggaaccactttagggtgtcttttgatttcatgaagatattccttaaaatattattgattttcattgcgatattgtatgtctgattcaggatatgttgacttatacatcggttttgtctgggttattggatatgccaatccctaattttattagggaaggtgcgaacaagtccctgatatgagatcatgtttgtcatctggagccatagaacagggttcatcatgagtcatcaacttaccttcgccgacagtgaattcagcagtaagcgccgtcagaccagaaaagagattttcttgtcccgcatggagcagattctgccatggcaaaacatggtggaagtcatcgagccgttttaccccaaggctggtaatggccggcgaccttatccgctggaaaccatgctacgcattcactgcatgcagcattggtacaacctgagcgatggcgcgatggaagatgctctgtacgaaatcgcctccatgcgtctgtttgcccggttatccctggatagcgccttgccggaccgcaccaccatcatgaatttccgccacctgctggagcagcatcaactggcccgccaattgttcaagaccatcaatcgctggctggccgaagcaggcgtcatgatgactcaaggcaccttggtcgatgccaccatcattgaggcacccagctcgaccaagaacaaagagcagcaacgcgatccggagatgcatcagaccaagaaaggcaatcagtggcactttggcatgaaggcccacattggtgtcgatgccaagagtggcctgacccacagcctggtcaccaccgcggccaacgagcatgacctcaatcagctgggtaatctgctgcatggagaggagcaatttgtctcagccgatgccggctaccaaggggcgccacagcgcgaggagctggccgaggtggatgtggactggctgatcgccgagcgccccggcaaggtaagaaccttgaaacagcatccacgcaagaacaaaacggccatcaacatcgaatacatgaaagccagcatccgggccagggtggagcacccatttcgcatcatcaagcgacagttcggcttcgtgaaagccagatacaaggggttgctgaaaaacgataaccaactggcgatgttattcacgctggccaacctgtttcgggcggaccaaatgatacgtcagtgggagagatctcactaaaaactggggataacgccttaaatggcgaagaaacggtctaaataggctgattcaaggcatttacgggagaaaaaatcggctcaaacatgaagaaatgaaatgactgagtcagccgagaagaatttccccgcttattcgcaccttccttagagcatgactaaaaatgctgaatatgataaggagcgaagtgattatcagtatgctgttcatatagcctcgaattagtaatgtgttatatatgatatagttgacaatttttatcctgggtgttcttaaagttcgtagataaacattgtcgtttcaggtatacaggaatgctaacaggtggcggcaaaaatcaggcggtttatggcgcaagctgaagtggcaactgcaaactatcttatgcagagactctacacggattgggtttaaaagtatacatagataacagtttttatctgaagaagaaaaatatcaaggtgatatagcctatatgcctttgatgcggaggaatgaatgtgatgggagtgatgtatctgaatagttgaaaaaccgcagtcacgtcgtatgcaagaacgtgctgcggttggtttgactttgattgagacgttttggaatttttttcggtggcaaaaatggggcaaaacgctgcaaaaggggcaaaaaaggggcaaaaaaagagtggattatcgtagcttattgttgtcgctgatgatatttaacacattgaaaaataagtaaaatacttatgagtcagagagttgtgatttttgcccttacttgttcaggttgtattgttctttcttactaatttcttgattttgcgacatttaaaagcgactcaattcgttatatggcatcagaagagtatgcgtcatgccggaacgcccagcataagaaatctgatataaaaaactgtggcgtgtatggtacggattagaggggaaaatgtcagcacatttgcgaaatgaatcaaaaagcccgcagcaatgtgcgggcgttagtgtcagcgcacaaccagcacggagcactctgcgtgacgcactacagctgcggcgttggaaccgagcagataagtggtgatatccggtcgatgggaagcaatgatgatcatatgagcggggatcttcttcgccaattccagaatgcggtctttgggcgagccttcctcaacatggacatgcactctgtcggttggcagtttaaattttttaatgatctcttccagttgcgatttggcttccgctttcaggtcatccattgccggtaattctgcggaatacgctaaacccagagaggcatagtagggcagtgaaggtattaccgtcaggaaatgaacctctgcatcatcaatctttgcctcttcctcaacgtggctaatcacgcgttgagttaattctgaatcggaaatatcgatagggacaagaatcgttctgttcataaaacctcctgttttagtatccgcataaagtgtaacgccagatgacactttttgtgtaatgacggagttcacatttttaatttagatcaaaggaggaagaataagcagaaaaagcccgccataacagcgggcaggaggatttagaactgataaaccagacctaaagcgacaatatcatcggtagagatgccattggcagcgtagaagctgtcatcttcatccaacaggttgattttatagtcaacgtaggtggacatgtttttattgaaatagtaagtcgcgccaatatcggcgtatttaaccagatctttatcatcaacacctgccgggttgtctgcaccacccgcagcgtgcaggtcacggcctttagacatcaggaaagagactgccggacgcagaccaaaatcaaactggtactgtgcagtgacttcaaaattctgggttttgtttgccacagcataatcgctgtcgccaaacggggtcatattacgcgtttctgaatacatggttgccaggtaaatattgttagcatcgtattttagcccagcagtccacgcgtctgctttatcaccacccgccgcagtatggttaacctggtcattggtgcggtcagaagaggtgtatgccgcaccagcgctaaagcccatgcctaaatcatatgttgtggaaagaccccagccgtcaccgttttcatggcgaacatcacgtccgttgttggtgccttcctgaccattactggctccttcgttgttaccttgatactgcaccgcgaagttcagaccatttaccagaccgaagaaatcagtattacgataagtcgcgacgccattggctcgaccagtcataaagttgtctgcattggtataagagtcaccgccaaattcaggcagcatatcggtccagccttcgatgtcgtacattacgccataattacgtccgtaatcgaaagaaccgtaatctgcaaatttcagcccggcaaatgccagacgggtccatgactggttttttgaagattcagtgttgtttgcctgaatattgtattcccattgaccgtagccagtgagttgatcgttaatttgggtttcgcctttaaaacccagacgcgcatagctctggtcgccatctttcgctgaattatcagaaaaataatgcaggccatcaactttgccatacagatctaatttgttgccgtctttattataaacttcggctgcatgtgcagcacctgcggcgagcagggcaggaattaaaagtgccagtactttgcttttcattgaataaatcctttagttattttatttgccttttatccccatttcggggagtgaaaacatcctaaaggagaagttcagttagccgataaatatcatttgttacgccttaagtaaaaccttaatcaaataattcctctgaaatgataataagtctggtgaatgtatcgaagataatacatacaaaataaaaattatacttttaatttgctatacgttattctgcgcgggttatatgcctttattgtcacagaatttattttctgttgggccattgcattgccactgattttccaacatataaaaagacaagcccgaacagtcgtccgggctttttttttagaattggataatccttatccagagcatttaatcggtgttgcttttttccgcttttccggccatttgtgccaggaagtcatagcgtttttgcaaatcagctgcagcatctttccataactgttctgccacttctggctgctgcgaattcagccgacggaaacgttgctcgtgaagtaacgtttcttccggtgcttctgacggcgggcgtgaatccaaggccagcggcagtttgccttcatcggcacgacgcggatcaaagcgatatagcggccagaagccggtagctgtgagttggcgcatctggtcgtggctgagtgccagatcgtaaccatgctcttcacacgggctataagcaatgatcagcgatggccccggatacgcttccgcttcctgaatcgctttcaccgtctggttcagctgcgcgccgagagaaatctgcgccacataaacatgaccgtacatcatcatactgacgccaagatctttacgcgctttacgtttgccgtgctcgccaaatttagttactgcacccagcggtgtcgctttcgacgcctgaccaccggtgttggaatagcattgcgtatccagcaccagaatgttgacgttttccgtcaaactcaatacatgatccagaccgccaaagccgatatcgtaagcccagccatcaccaccaatcagccagattgatttttccaccagtgcatctgcatcacgtagcagttcatgtgcttcggcaacatcgttgagttgctggcgtaaagctgcaacctgttcacgacgaacctctggcgtggcgtctgatttcaacgccgtcagtaattccgccgggattttatcggcaaattgatccagcagacgcagcacgcggacacggtgttgatcgaccgtcaggcggaaaccaaggccaaattcggcattatcttcaaatagagagttcgcccatgccggcccacgaccgttggcatcggtggtatacggtgtagagggcaggttaccgccataaattgaagaacagccagtggcgttagcgatcaacatccggtcgccatagagctgagtcagtaatttaatatacggcgtctcgccacaaccggagcaagcacctgaatattcaaacagcggtgtaatcagctgcgatgtacgaatatcaatacgttccagtttgctacggtcgatttctggcaggttgaggaagaaatcgtaattgattttctcttcttcgacatgttccaggcgagacatcatattgatggctttaatctctggattctgacggtctttcgccgggcaaacttcgacgcacaggttacaaccggtgcaatcttccggtgccacctgcaagacatatttctgcccgcgcatatcacgcgatttcacatccagcgaatgcaggctggcaggggcgttttccatcgcttcaggcggcaccacttttgcgcgaatagctgagtgtgggcaagcggcaacgcagtggttacattgggtacagagttcctctttccagatggggatctcttcggcgatattgcgtttttcccagcgcgtagtgcccatcggccaggtgccgtctggcggcagcgccgaaacggggagggcgtcaccaagcccggcgagcatcgcagcggttacggttttcacgaaatcaggggcggcatcggaaaccactggcggtcgattggcgctgtgcggatttaccggttgcaacggaacttcttctacggattcacgcgccagcgccagagcctgccagttgcgttccaccagatcctggcctttgctactgtaacttttggcaatcgcaccctgcaattctgcgagggcgctatcgccaggcagaatttgcgtcagatggaaaaaagccatctgcatgacggtattaatacgggccgccaggccacattcgcgggcgattttcgccgcgttaatcacatagaagcgcgcttttttctggtttaacacggcctgaacttcttgcggcaagcgcgaccacacttcatctgcgctgtacggcgtgttgagcaggaaaatgccgccaggttttaaacgctcagccatctgatatttatcgataaactgcaactggtggcagccaacaaaatcagcctgggaaatgagataagcggaacgaatcggctgttcgctcactcgaaggtgagaaaccgtcaggccgcccgcctttttggagtcgtaaacaaaatagccctgtgcgtaccacggcgtggaattaccgataatcttgatattgtttttggtcgcggaaacgctgccatcactaccaaggccataaaacaaggcttccagtttcgccgagtttggcagggtgttttccggcaacggcagtgacagattggtcacatcatcgtaaataccaaccgtaaagcgcgctttcggtttagccgcgttgagctcggcaaataccgccagtacacagtctgggccaaattctttggatgaaagaccatagcgcccaccaatgacacggggcagagtttcgcgctcgccattattaaaggcttctgccagtgcggtcattacatccagatagagcggttctgcctgggcaccgggttctttggttctgtccagtaccgccacgctgcgtacggatcccggcagagcttgcagtaaatgtttagcggagaaggggcggtacaggcgaactttcagcacgccaactttttcgccacgggttagcaattcatcaaccacttcttcacaggtgccaatggcagagcccatcaggataatcacccgttccgcttgcggatgcccgtaatattcaaacggctgatactgacgacctgtcgcggcagagaaatcattcatcgcctgttcaacatggtcatagaccgcgttgtaccatgggttggtggcttcgcgagactggaaataagtgtcaggattggcggacgtaccgcggatcaccggatgttccgggttgagtgcccgggcgcgatgagcatcaatttcgacctgcggcatgagatcaagaatcgtgtcatcggccagcgggacaattttattgatttcgtgggacgtgcggaaaccatcaaagaaatgaataaatggcacgcggcttttcagcgtcgcgatttgcgaaatgagagcaaagtcttgcgcttcctggacgtttgctgcacacaacatcgcgcaacccgtctggcgcaccgccataacgtcggaatgatcgccaaaaatagagagtgcatgtgtggcaacggtacgtgccgctacatgcaggacaaacggtgttagttcgcctgccagtttgtacagcgtcgggatcatcagcagcaaaccctgcgatgacgtaaacgatgttgaaagggcacccgtctgcaaagcgccatgcacggtagcgatagcacccgcttccgactgcatttcaaccacgcgtggtgtgtctccccaaacgttctttaagccgtttccggcccaggcatcagcctgttctgccatcgtggaactgggggtaatagggtagatggcgataacttcactggtgcgaaatgcgaccgaagcaaccgcgccattaccgtcaatagtaatcatatgacacccttacattgcgcaaatgaggggcgcacgaaattgctgcgcgcccagtagtaatctttcaattttagcaaatggctttcttctgcattttcgcttttgtgtcccccacatcagcgtaatgaatgttttgatcaaacagagggcaaaaaaatagccataaaaaagtaaaaatgcggggcaacgcgcaggacagctctcgacgccgccctctgtgctgcctattatttatggcggtgtcgtttggcttgaagatcagaggaagaaaagatgcgagcagcgttttgggtagggtgtgccgctttattgttgtcggcgtgtagtagtgaacctgttcagcaggcgactgccgcgcacgtagcgccaggtttaaaagcgtcgatgtccagtagtggagaagcaaattgtgcaatgatcggcggttcgctttctgttgcccgtcaactggatggtacggcgattgggatgtgtgcattacccaacggcaaacgctgtagcgaacagtcacttgccgccgggagctgtggcagctattaattcattaaatccgccagcttataagttaatgtctgttttgcggtcgccagcgttaactggttcgcggtcagatccacttgtgcaccttctttcagcatttcgctaatggtgttatcgagttcattaagctgcgggttagcgcacatcatacgggtcattgccagccctttggctgtcagttcaccattagacagtttgccttcaccgctaaagcggttacacatgctgccggaaatcatcattttttcaccaaagctgatttctggcggatttttatcgctggtcacgggcttaccgtttacgctttccagcacaaagcgatgatgctgtagctgttctggcgtaacagcaattttgtcattacttacacatcccgccatcagcaggcttagcgcaacaaacgcggctactttcttcattgtggttctcaattacagtttctgactcaggactattttaagaatagaggatgaaaggtcattggggattatctgaatcagctcccctggaatgcaggggagcggcaagattaaaccagttcgttcgggcaggtttcgcctttttccagattgcttaagttttgcagcgtagtctgagaaatactggtcagagcttctgctgtcaggaatgcctggtgcccggtaaacagcacgttgtggcaggcagacaggcgacggaatacgtcatcctggatcacgtcgttggatttatcttcaaagaatagatcgcgttcgttctcatacacgtccatacccaacgaaccaattttctgatttttcagcgcttcaattgctgcctgagaatcaatcaatgcaccgcgactggtattgacgatcatcacgccatttttcatctgttcgaaggcggcttcgttcaacagatgatagttttccggtgtcagcgggcagtgcagagagataacgtctgattcagagaacagggttggcagatcgacatactccacaccgagttccagcgccgctgcacttggatacggatcgaacgccagcagacgcataccaaaacctttcagaatgcgcagcatcgccacaccgattttaccggtaccgataacgcctgccgttttgccatacatagtaaagccggtcagaccttccagagagaagttagcatcacgggtacgctgatacgcgcggtgaatacggcggttcagcgtcatcatcataccgatggcgtgttcagcaacggcctctggatcataggctggaacacggactactttcagccccagttcttttgccgcgtcaaggtcgacgttattgaaaccggcacagcgcagggcgatatatttaacgccgtgctttttcagctcttccagcaccgggcggctgccgtcatcgtttacgaaaatacataccgcttcgcagccattggcagttttagcggttttttccgtcagcagaaagtcaaaaaattccagctcaaagccaaaggactcgttcacctgttgcaggtacttcttgtcgtactgttttgtgctataaacggcgagtttcataagactttctccagtgatgttgaatcacatttaagctactaaaaatattttacaaaatttcaaatttaattgaaagctatggcgatattgaaaaattcatcaacaactatgcttagtgtaggcgcaaccttcaactgaacggttaaacatgccacaatacccgtattgaatgcttaatttttcgctaaatcaggatattaactacccatgctgggtaaatataaagccgttctcgcgctgttattactgattattcttgtgccgttgacgctgctgatgacgctcgggctgtgggttcccacgctggcgggcatctggctaccgctcgggacacgtattgcattagatgaaagcccacgcattacgcgtaaaggtttaatcattcccgatctccgttatctggtgggagattgtcagcttgcgcatatcaccaacgccagcctttcacatcccagccgctggttattgaacgtcggcacggtagaacttgattctgcttgtctggcgaaattgccgcagacggagcaatcgccagccgctccaaaaacactcgcgcagtggcaggccatgctgcctaacacctggatcaatatcgataaactgattttttctccctggcaggaatggcagggaaaactctctctcgcattaacctctgatatccagcaactgcgttatcagggcgaaaaagttaaatttcaaggccagctgaaagggcaacaacttacagtcagcgaactggatgtcgtcgcgtttgaaaatcagccgccggtaaaactggtgggggaatttgctatgccgctcgtgccggatggacttcctgtaagtgggcatgctactgcgacgttaaacttgccgcaggaaccgtcactggtggatgccgagctggactggcaggaaaatagcgggcaattgatcgtgctggcacgggataacggcgatccgttgctcgatttgccgtggcaaattactcgtcaacaattgaccgtaagcgatggtcgctggagctggccgtatgcaggttttcctttgagtggccgactgggtgtcaaagtcgacaactggcaggcagggcttgagaacgctctggtcagcggacgactgagtgtgctgacccaggggcaagcgggtaagggcaacgcggtgcttaattttggcccaggaaaattaagcatggataacagtcagctgcctctgcagctgaccggtgaagcgaaacaggcggacctcattttatatgcccgtttacctgcgcagctaagtggaagtctgtctgacccaacgctgacctttgagccaggcgcgttacttcgttcaaagggaagagtcatcgattcgctggacatcgatgaaatccgctggcctttagcgggtgtaaaagtcacccaacgtggtgttgacggacgtttgcaggccatcttgcaggcgcatgaaaatgaactgggcgatttcgtgctgcatatggatgggctggcgaatgattttctccctgacgctggccgctggcagtggcgctactggggaaaagggagttttacaccgatgaatgccacctgggatgtcgcaggaaaaggtgagtggcatgacagcacgattacgctgaccgatctctccaccggtttcgaccagttacaatacggtacgatgacggtagaaaagccgcgattaattctcgacaagcccatcgtctgggtacgtgacgcacagcatccctcctttagcggcgcgctgtcactggacgccgggcaaacgctgttcactggcggcagtgtgttaccgccatcaaccttaaaatttagcgtcgatgggcgcgatcctacctatttcctctttaaaggcgatttacatgctggtgagattggcccggttcgggtaaatggtcgctgggacggtattcgtctgcgcggtaacgcctggtggcctaaacaatcactgaccgtattccagccgctggtgccacccgactggaagatgaacttacgcgatggtgaactgtatgctcaggttgcattttctgctgcgcctgaacaaggattccgcgcgggaggacacggcgtgttgaaaggcggtagtgcctggatgccagataatcaggttaacggtgtcgattttgtcctgcctttccgttttgccgatggagcctggcatctggggactcgcggccccgttacgttgcgaattgccgaagtgattaatctggtgacagcgaaaaatattacggctgatttgcaagggcgttatccgtggactgaagaagaacccttgctgttgactgatgttagcgtcgatgtgttaggcggtaacgtactgatgaaacaattacgtatgccgcaacatgacccggcgctgttgcggctgaataatctctcatccagcgaactggttagcgccgtcaatccgaaacaattcgccatgtccggggcatttagtggtgcactgccgttatggctgaacaatgaaaaatggattgtgaaagatggctggctggcgaatagcgggccgatgacattgcgactggataaagacactgcggatgcggtggtaaaagacaatatgactgcgggttcagcaattaactggttgcgctatatggaaattagccgttcatcgacaaaaattaatttagataatctcggtttattaaccatgcaggccaacattacaggtaccagtcgcgttgatggtaaaagcggtacggtaaaccttaattaccatcatgaagagaatatttttacgctgtggcgcagtttacgctttggcgataatctccaggcatggctggagcagaacgcacgtctgccgggaaatgactgtccgcaaggaaaagagtgtgaggaaaaacaatgaaaattttactggctgcgttgacgtcatcttttatgctggttggctgtacgcctcgcattgaagtcgctgcacctaaggaaccgatcactatcaatatgaacgttaaaattgagcatgagatcatcatcaaggcagacaaagatgtcgaagagctgcttgaaactcgtagcgatcttttctgaggtgatgatgaagaaaacattacttctttgtgcgtttcttgttgggctggtaagcagcaatgtaatggcattgactctggatgaagccagaactcaggggcgggtaggtgaaacattttacggttatctggttgcgctgaaaacggatgctgaaacagagaaattagtagccgacattaatgccgaacgtaaagcgagttaccaacaactggcaaagcaaaataatgtgtcggtagatgatatcgcgaaactcgccgggcaaaagctcgtagctcgggccaaaccgggggaatatgtacaagggataaacggtaaatgggtgcgaaaattttaatagcaaaaccgcaatatcgggataacgctacaggagaaggcgattgatctattttcctgaaacaaggtgaatattcaaaaactcctgtcaaattgccttttgccctgaaaaatgcatagtcaaatatctgttttaactaattggcgttgcagtacatgcaacgccaattagttagcggaatttacgtcgatactcgcctggcgtcatcccaaagcgttgcttaaataccgttgaaaaatgactctggtcagaaaatccccaatgaaagccgatgcctgccagtttttcatcatctgcggcatggcgaatcgcatctgcacaaaaatcgagacgacggttacgaatatattgcgcgactaccaaacctttatcggcaaacattcggtacaaactacgtactgacatacctgtctctccggctatccactccgggcgtaatatctcttcgcgaatattatcgtctatcaacgtaaccactttttgaaactgacgttcacgacgaggttgaacagattcccgctgatgaagtaccgggcgcagcagacacaccatcgcctgtagcgcagcttcactttctgtttcagaaagtgccggattattcatgctctcctgtaacaggcgatgactgagttgcaccatgggtaagtcagcgtccagtctttctgcgcagataggtttttgatggggaaaatattgttccagcagagtgcgtggcaaaagtaatgaaatctgtttagaagactcctgccagtaaagcgaacaggggcgtgaggcatcgagtaacgtaatatcgccagcgccaatctgcacctgacgctcatcctgctccattattgcctgaccactaagctgaaaaacggtgtaaaaccaggcatcgtcgctgccttttacttcctgccaggtgcgggataaattcaccccgctggttgtcacggtactcagctttagtcctttggcaaaatgcgtgtccagtacacccgtgtaacgctcagtcagcaggcgtccggtaaaatttccgcatacctgattgatttgggaaagccattgctgaaactcattatccactgcggggttcatggcacgttttcgctctgtgaaatgtatttttattgttgcatttgtgttgcaataaacgaagctaatgagcctgactataggaaataagtcttgtcaggcatagagacataagcggttattgtcacgatttgcggagcttgtcacagctgacaaagcgaatgtcacagcgaaaaaagtgacttttcttgtcgctgcgtacactgaaatcacactgggtaaataataaggaaaagtgatgacagagccgcatgtagcagtattaagccaggtccaacagtttctcgatcgtcaacacggtctttatattgatggtcgtcctggccccgcacaaagtgaaaaacggttggcgatctttgatccggccaccgggcaagaaattgcgtctactgctgatgccaacgaagcggatgtagataacgcagtcatgtctgcctggcgggcctttgtctcgcgtcgctgggccgggcgattacccgcagagcgtgaacgtattctgctacgttttgctgatctggtggagcagcacagtgaggagctggcgcaactggaaaccctggagcaaggcaagtcaattgccatttcccgtgcttttgaagtgggctgtacgctgaactggatgcgttataccgccgggttaacgaccaaaatcgcgggtaaaacgctggacttgtcgattcccttaccccagggggcgcgttatcaggcctggacgcgtaaagagccggttggcgtagtggcgggaattgtgccatggaactttccgttgatgattggtatgtggaaggtgatgccagcactggcagcaggctgttcaatcgtgattaagccttcggaaaccacgccactgacgatgttgcgcgtggcggaactggccagcgaggctggtatccctgatggcgtttttaatgtcgtcaccgggtcaggtgctgtatgcggcgcggccctgacgtcacatcctcatgttgcgaaaatcagttttaccggttcaaccgcgacgggaaaaggtattgccagaactgctgctgatcacttaacgcgtgtaacgctggaactgggcggtaaaaacccggcaattgtattaaaagatgctgatccgcaatgggttattgaaggcttgatgaccggaagcttcctgaatcaagggcaagtatgcgccgccagttcgcgaatttatattgaagcgccgttgtttgacacgctggttagtggatttgagcaggcggtaaaatcgttgcaagtgggaccggggatgtcacctgttgcacagattaaccctttggtttctcgtgcgcactgcgacaaagtgtgttcattcctcgacgatgcgcaggcacagcaagcagagctgattcgcgggtcgaatggaccagccggagaggggtattatgttgcgccaacgctggtggtaaatcccgatgctaaattgcgcttaactcgtgaagaggtgtttggtccggtggtaaacctggtgcgagtagcggatggagaagaggcgttacaactggcaaacgacacggaatatggcttaactgccagtgtctggacgcaaaatctctcccaggctctggaatatagcgatcgcttacaggcagggacggtgtgggtaaacagccataccttaattgacgctaacttaccgtttggtgggatgaagcagtcaggaacgggccgtgattttggccccgactggctggacggttggtgtgaaactaagtcggtgtgtgtacggtattaatctggttcgctcataagtaaaaaacggcacctggtgccgtttttttgtctgaaacaatcacttatctttcttcagcgcccctagcgttggcgtttcgtcaaagaagttccatggtttcagcagagtatgtacccattcggtcggcataatcggccactcttcggcgcgggccacatgtgtggtgccggtggtcatccagacaacggcgtcggtgttgtccagcgactcgttatccttactgtattgtccaagaccggtgtcatgagtagaacggttcggatatttgccttccgggaaacgctcgccaggatgataacgcgttacccagagctgcttgtccataaagcttaaacgatgatagatccactcgtccggcgcgaactgggcaccttttgctaccgggtgagtaccacctgcataaggaataatttgataggaaaccggattgcccatgcggttctctttgttcgggttactcaacagacgaatcgtgcccggatcaaatttctgtgcggcatcctgttcattgccgatgttgtactgattaacttgcatggtactggtgcgtgggccaccggcagtattcggttttaccactgggtccatcgccaccaggctgttattctcgccatctacatccagatcgaggcggaaattataaatatgttggtgtgtagtacccacgatattgtgatcgataagcgtgccgtagcgcgtgtcatctttcgccgtctcatcgtgcatggttttcgctttaacacctttcaccgcttcgatgcccgtagcaccggcatcgatgccaatagtgccgttttcatggaagatccagtcaaaaatgtagtcatagttacccactgtactgatccagcgcaccactaactcccggcgttcggtactgacgttgggctggcccatttcctgatgcttatactccggcccggcataacgttcaaataccgcgatagcgcgagggatctccatcggcacgccagtgtagtcggcgatggtttcattaaggagcactgcgttagacggggcatctttaccacgagcaattggtgaggttagcgtgcccataccgtagtcaccagagtccagatacgctttaaagtaccagccaatatcaggatcaccgtaaggcacaatcatgccgccgagagaaccttcgtacatgactttgcgtttggtgccattgtcgttataagtcacggtggagatcatcggcccgacgcgagagttcatgctgaggtgaaaatcccagttccgccagtgaatcatatcgccagtaatggtgtaatttttaccttcaggctcaatgatttgcataggcttaactgccggagcaacgcggtcacggccatcaaatgggcgtgcggtcattggcaccggaactaccggaccttcttcaatcttaacgatttttttctgttctaaatcaacgaccgccaccaggttttcgatgggatgtgcccagtagttgccatcaccgacatcaagatagctgatgactttgagcaaccgggcatcttgtttcaggccatctttaccatcgaaataacctacggtcagcggcgtggtaatcacttttttcgcatcagtaataccgcgtttcttcacggcagcggcaaattcttcactgttgttaataatgttctgcacactggcgaaatcatccagcaacaccataccgtgggcgtctttaatgggttgccaggagagcagtttgttgttttgcagatccaccaccgcttcgatgatatgtttgccgtcgagcataatgacgtcggctttgcgcggctggtcaaccggtttgttttccagcgcaaacgcccagacagcttctttatctggcggtagcagggagatctcagtaaaacgggtattgggtttgaagtccgcggaagctttaacaatttcaacggcctgtttaatttcgtccgcagttagcgcattaagtgggtgagggcgcttttctacctgaaaggtttgatccagcccggactggaaaacatcgttaataaaggtgtcagaaacccaggctttattgtctttcatcactaccggtacttgcagtgccagaggctgaccattaacaattgctgtttgcgcaccaggcttcactttcacgtacgcgccatctttaatcagggtaaagagctgggcgtagtcgtcccactgcacatcggcaccaaattctttaagcgttttatccattggcaccatatgcgcttcaccaccgtgggcaaataccggcgcttgccaggcgaaacttaaggcgactgccaacgccagggttgttttacgggcagaatacagagaggggcttcccattattaacctcgtcagatgttgtgttcttgttagcaaccgcgctctgtgggcggtttagtcaggttcacattatcagtactgatgcaaaggggattgcctgcacctgccaggttgtttggcaggtgtgccagcttttcatacagtggatgccctgaaaatagatgtacacatcatgcataatgtgacaacgtcacaaaacttagtgaaataaaagggcaactattcgccgttgcccttcattcaccgattaatcgacaaaatcaccgtgctgcctggccaccagcgtcagaattgaatacagcgccaccggggtttgatgctgattgaatacctctacagcccattccaccacacctgttggtttttcttctgcgctacgctgttttttcagcgtcttgcgcttacaggtgagacgcacctggatggtatcgcctggctttacgggttcgataaaacgcaagctttccagcccgtagttagcaatgaccggaccgacaccggcatcgacaaacagacccgcagccgcagaaagcacaaaatacccatgcaccacccgctcaccgaaaatagattcggcagcagcaatcttatccatatgtgcatagaaatgatcgccgctgaggcaagcaaagttaacaatatcggcctctgtcattgtgcggcggggagtcaacaggctgtcgcctggttgtagctcctcaaaatatttgcggaacggatgaatacgatcttcttcgactttcgcaccgcgcacccactgtttactgatagcggcaagcatcgtcggactaccctgaacagcggttcgctgcatgtaatgtttcaccgctcgtaaaccgcctaattcttcaccgcctcctgcgcgaccaggcccaccatgtaccagttgtggcagtggggagccatgcccggtggattcttttgccgactcttcattgaggatctgaattcgcccatgcgtacgtgccgcgtcggcaataaactgacgcgcaatttgcggatcagccgtcaccagcgttcccgcaaggctaccgccgcctgcacaagccagttgcagagcatgtcgctggttttgtgctggcatcagcgttgcgacagggccaaaggcttctgttgcatgtaccgccggtgtttcatccggctgcggacagtacaataaggttggcgggaagaaggcacccgcagcagataaatccgcctgaccaccgaggcgaatctcgcatcctgcagccagcaatatgttcactttttcctgcacatcggcacgctgctcagcatttaccagtgcgcccattttcacgccttcctgagcaggatcaccgaccacgactttctgtaatcgcgcaaccagagcatcactgacagcattaaccaatgcctgcggcacaataatccgccggattgccgtacatttttgcccggcttttgtggtcatctcacgcacaacttcacgaataaacagcgcaaactccggttgatccggggtgacatcttcgcccagtacgcagcagttcagggaatcagcttccatagtgaaggggatagatttggcgacgatatttggctgaactcgcagcatctgtccggtcgccgctgaccccgtgaaagtcaccacatcctggctgtccagatgatccaacaagtcgccagcactaccgcagatcagactaattgcgccttcgggaacaagaccactatcgacaattgatttcaccatcgcctgagtcagttgggccgtcgcggtagctggtttgatgatggctggcattccgcccagccacgttggtgccagcttttccagcattccccagcaggggaagttaaaggcgttaatatgcactgccacgcctgactttgaggtcagtaaatggcgcgcggcaaatccaccttctttcgataaggggatcaattcatcttccggccacagcgtatcgtcaggcagctcccggctaccgaggctggcgtaagtaaataacgtcccaatgccaccttcaatatcaacccaactgtctgcccgcgttgcgcctgtttgcgcagaaagagcatagaaacgctctttttcactcagcagatgtttagcgaccgctttaagcatcgccgcacgttcgataaaggtcatagcgcgaagggcgggggcacctttttcaatggcaaactggcgggcagccgccatatcaagaccttcactggtcacttcccataacgcctcgccgctaatagcgtggtgaatcaaacggctacggccccggccagactgccaggtaccggataagaaactggctaactgctgcatcgctactctccagatgtttcacatttctgttgctaatagttaaatcgcgaatcataaaaagcaaaggatcttttaacgaaatgttaactatgcgatctgtatagcaactgcggaaaacattaatgcactgataaataatgatttataaaaatagggtgcgaaatccgtcacagttcaaacatacaaaatttgtgattttacttaactattgtgtaactttcataaaacaatgtgattcgtgtttttaattaattcacgaaaactggaatcgtaaaggtgatgacgtgacccaagaagaacgctttgagcaacggatagcccaggaaacggctatcgagccacaggactggatgcccgatgcttaccgaaagacattgatccgccagattgggcagcatgcgcactccgagattgttggtatgttgcctgaaggtaactggatcactcgcgcaccaaccttgcggcgtaaagccattctgttggccaaagtgcaggatgaagccggtcatggtctgtatctctatagcgccgccgaaacactgggctgcgccagagaagacatctaccaaaaaatgctcgacggacggatgaaatattcctccatctttaattatccgacattgagttgggctgatatcggtgttatcggctggctggtggatggcgcagcgatcgtcaatcaggtggcgttatgccgcacttcttatggcccgtatgccagagcaatggtgaaaatctgcaaagaagagagttttcaccagcgtcaggggtttgaagcctgcatggcactggcgcagggcagcgaagctcaaaagcagatgttgcaagacgccattaaccgtttctggtggccagccttaatgatgttcgggccaaacgatgataactcgccaaacagcgccagaagtctcacctggaaaatcaaacgtttcaccaacgacgaactccgccagcgtttcgtggataacaccgttccacaggttgaaatgctcggtatgaccgttcctgacccggatctgcattttgacactgaaagcggtcactaccgctttggtgagatcgactggcaggagtttaacgaagtaattaacggtcgcggaatttgtaatcaggagaggctcgacgccaaacgtaaagcctgggaagaaggtacctgggtacgggaagcagcgctggcccatgcacaaaaacaacatgcccgtaaggtcgcataaggagattcaaaatgagtaatgtttactggccgttatacgaagttttcgtgcgtggcaaacagggcttatcacaccgccatgttggcagtttacatgctgccgatgagcggatggcactggaaaatgcccgtgatgcttacacccgtcgtagcgaaggatgttcaatttgggtggtgaaggcgagtgaaattgttgcctcgcaaccggaagaacgcggtgaattttttgatccggctgaaagcaaggtctatcgccatccaacgttttacaccatccctgatggcattgagcacatgtgaggtcggaaatgaatcagttaacggcttacaccttgcgcctgggcgataactgcctggtgctctcccagcggttgggtgaatggtgcggtcacgcaccggaactggaaatcgatctcgcactggcaaacattggcctcgatttattaggtcaggcacgcaacttcttatcgtatgccgctgaattagcgggagaaggcgatgaagataccctggccttcacccgagacgagcgccagttcagcaacttattgttggttgaacaaccaaacggcaattttgccgacaccattgcacgccagtatttcatcgatgcatggcatgtggcgctctttacccgtctgatggaaagccgtgatccgcaactggcggcgatttctgccaaagcaattaaagaagcgcgctatcacctgcgttttagtcgtggctggctggagcgactgggcaatggtactgacgtatcagggcaaaagatgcagcaggccatcaacaagttgtggcgttttaccgccgaactgttcgatgccgacgagattgatattgcactgagtgaagagggtattgcggttgatccacgcactttacgcgcagcgtgggaagccgaagtttttgccgggatcaacgaagccacattgaacgtaccgcaagagcaggcgtatcgcactggcggtaaaaaaggactgcataccgaacaccttggacccatgctggcagaaatgcagtatctccagcgtgtcttgcccggtcagcaatggtaacagaggagatgggtatgcaacgtctggccaccattgcaccgccacaggttcatgagatatgggcgctactcagccagatcccggacccggagatcccggtgctgaccattactgatttaggcatggtgcgtaatgtgacacagatgggagaaggatgggtgatcggctttacgccgacatattccggttgtccggcaacggaacatttgattggcgcgatacgtgaggcaatgacaaccaacgggtttacccccgttcaggttgtgctgcaactcgacccggcatggaccaccgactggatgacccccgatgcccgtgagcgtctgcgagagtatggcattagcccgcccgccggacacagttgccatgcccatttgccgccagaagtacgttgcccgcgctgcgccagcgtccataccacacttatcagtgaatttggttccacggcctgcaaagcattgtaccgctgcgatagttgccgcgaacctttcgattatttcaaatgtatttgaggatgccatgacaacgtttcattccttaacagtggcaaaagtcgagtcggaaacccgtgatgcggtgaccattacctttgcggtgccccagcctttgcaggaggcgtatcgctttcgccccggtcaacatttgaccttaaaagccagctttgatggtgaagaattacgccgttgttactccatttgccgcagctatctgcctggcgaaattagtgtggcggtgaaagccattgaaggcggacgtttctcccgctatgcccgcgaacacatccgccagggtatgacgctggaggtcatggtgccgcaggggcatttcggctatcagccgcaggccgaacgccaggggcgctatctggcaattgcagcaggatcaggtattacgccaatgctggcgattatcgccaccactttacaaaccgagcctgaaagtcagttcaccctgatctacggtaaccgtaccagccagagcatgatgtttcgccaggcactggcagacctgaaagacaaatatcctcagcgtttacagttgttgtgcattttcagtcaggaaaccctcgacagcgatctgcttcacgggcgtattgacggtgaaaaattacagtcacttggggcctcgctcattaattttcgtctttatgatgaggcatttatttgtggtccggcggcgatgatggatgacgcggaaaccgccttaaaagcactgggaatgccagataaaaccattcatctggagcggtttaatacgcctggcacgcgcgtcaaacgtagcgttaacgtgcaaagtgacggacaaaaagtgactgtacgtcaggatgggcgggatcgggaaatcgtgcttaatgccgacgatgaaagcattctcgatgcggcattgcgccagggggcggatctgccctatgcctgcaaaggcggcgtctgtgcgacctgcaaatgcaaagtgctgcgtggcaaagtggcgatggaaaccaattacagtctggaaccggatgaactggccgcaggttatgtgttgagttgccaggcactgccgctgaccagcgatgtggtggttgactttgacgcgaaggggatggcatgagcgaactgatcgtcagccgtcagcaacgagtattgttgctgacccttaaccgtcccgccgcacgtaatgcgctaaataatgccctgctgatgcaactggtaaatgaactggaagctgcggctaccgataccagcatttcggtctgtgtgattaccggtaatgcacgcttttttgccgctggggccgatctcaacgaaatggcagaaaaagatctcgcggccaccttaaacgatacacgtccgcagctatgggcgcgattgcaggcctttaataaaccacttatcgcagccgtcaatggttacgcgcttggggcgggttgcgaactggcattgttgtgcgatgtggtggttgccggagagaacgcgcgttttgggttgccggaaatcactctcggcatcatgcctggcgcaggcggaacgcaacgtttaatccgtagtgtcggtaaatcgttagccagcaaaatggtgctgagcggagaaagtatcaccgctcagcaagcacagcaggccgggctggttagcgacgtcttccccagcgatttaaccctcgaatacgccttacagctggcatcgaaaatggcacgtcactcgccgctggccttacaagcggcaaagcaagcgctgcgccagtcgcaggaagtggctttgcaagccggacttgcccaggagcgacagttattcaccttgctggcggcaacagaagatcgtcatgaaggcatctccgctttcttacaaaaacgcacgcccgactttaaaggacgctaatgatggaattcatcctcagtcatgtagaaaagggcgtgatgacactaacgctcaaccgcccggaacgcctgaacagttttaatgatgagatgcacgcacaactggcagagtgcctgaaacaggtcgagcgcgacgacactatccgttgcctgttacttacaggtgccgggcgcggattttgtgctggtcaggatcttaacgatcgtaacgttgatcccacaggccccgcaccggatttagggatgtcagttgaacgtttctataacccactggtacgtcgcctggcaaaactgccaaaaccggtgatctgtgcagtcaatggcgtggcggcaggggcaggcgcaacactggcactggggggcgacatcgttattgctgcccgttcagcaaaattcgtcatggcgtttagtaagttaggcttaatacccgattgcggtggaacctggttactgccacgcgttgccggacgagcgcgcgccatggggctggcactgctggggaatcaactgagtgctgaacaggcgcacgaatgggggatgatctggcaggttgttgatgatgaaacgctggcagataccgcgcaacagctggcacggcatctggcgacacaaccgacatttggtcttggacttatcaagcaagcgataaatagcgctgaaaccaatacgctcgatacgcaactggatctggaacgtgactatcagcgacttgccggacggagcgcagattatcgtgaaggtgtcagtgcgttcctggctaaacgctcaccgcagttcacggggaaatagcatgatgataaatgtgcaaactgtggcagtgattgggagcggcaccatgggggcaggcattgctgaagttgctgccagtcatggacaccaggttttactgtatgacatttctgctgaagcgctgacccgcgcaatcgacgggatacacgcgcggctaaattcacgcgtgacgcggggaaaactgactgctgaaacctgtgaacgcacattgaaacgcctgatcccggtgaccgatattcacgcgctggcagctgcggacctggtcattgaagcggcgtctgaacgtctggaagtcaaaaaagcgctctttgcacagctggcggaagtttgcccgccacaaacgctattgaccactaacacttcgtcaatctctataaccgcgattgctgcggagataaaaaatcctgaacgtgttgcggggctgcatttttttaacccggcaccggtgatgaagttggtggaggtggtcagtgggctggcaacggcggcggaagttgttgagcagttgtgtgaactaacgttgagttggggtaagcagcctgtgcgctgtcattcgactcctggatttatcgttaaccgtgttgcgcgtccttattattccgaggcctggcgggcactggaagagcaggttgctgcaccagaagtgattgacgctgcacttcgcgatggcgctggtttcccgatggggccgctggaattaaccgatctgattggtcaggacgtcaattttgctgtcacctgttcggtgtttaacgctttctggcaggagcgtcgttttttaccttcgctggtgcaacaggaactggtgattggtggacggttgggcaagaaaagtgggctgggcgtgtacgactggcgcgcggaacgtgaggcagttgttggcctggaagcggtaagcgacagttttagcccaatgaaagtagaaaagaaaagtgacggtgtcacggaaattgacgatgttttattgattgagacacaaggcgagacggcacaggcgctggcaatacgactggcacgcccggtggtagtgatcgataaaatggcgggcaaggtggtgaccattgctgctgcagcggtgaacccggactcagcgacccgcaaggccatttattacctgcaacagcagggcaaaacagtgctgcaaattgcagattacccaggaatgctgatttggcgaacggtagcaatgatcatcaatgaagcccttgatgcgcttcaaaaaggcgtggcctctgaacaggatatcgataccgccatgcgtcttggggtgaattatccatatggcccacttgcctggggagcgcaacttggctggcagcgaatattaaggctccttgaaaatctacagcatcactatggcgaagaacgctatcgcccatgttcattgctgcgccaacgggcgcttctggagagcggttatgagtcataaggcctggcaaaatgcccatgcaatgtatgagaacgatgcctgcgccaaagcgcttggcatcgacattatctcaatggatgaaggctttgctgtagtgaccatgaccgtcactgcacaaatgcttaacggtcatcaaagttgccacggcgggcagctattttcactggctgatactgcctttgcctacgcctgcaatagccaggggctggcagccgtcgcttctgcctgcacgattgattttttgcgtccaggctttgccggagacaccttaactgctactgcgcaggtacgtcatcagggcaagcaaaccggtgtttacgacatcgaaattgttaaccaacaacaaaaaacggttgcgctgtttcgcggtaaatctcaccgcatcggcggcaccattacaggagaagcctgatgcgtgaagcctttatttgtgacggaattcgtacgccaattggtcgctacggcggggcattatcaagtgttcgggctgatgatctggctgctatccctttgcgggaactgctggtgcgaaacccgcgtctcgatgcggagtgtatcgatgatgtgatcctcggctgtgctaatcaggcgggagaagataaccgtaacgtagcccggatggcgactttactggcggggctgccgcagagtgtttccggcacaaccattaaccgcttgtgtggttccgggctggacgcactggggtttgccgcacgggcgattaaagcgggcgatggcgatttgctgatcgccggtggcgtggagtcaatgtcacgggcaccgtttgttatgggcaaggcagccagtgcattttctcgtcaggctgagatgttcgataccactattggctggcgatttgtgaacccgctcatggctcagcaatttggaactgacagcatgccggaaacggcagagaatgtagctgaactgttaaaaatctcacgagaagatcaagatagttttgcgctacgcagtcagcaacgtacggcaaaagcgcaatcctcaggcattctggctgaggagattgttccggttgtgttgaaaaacaagaaaggtgttgtaacagaaatacaacatgatgagcatctgcgcccggaaacgacgctggaacagttacgtgggttaaaagcaccatttcgtgccaatggggtgattaccgcaggcaatgcttccggggtgaatgacggagccgctgcgttgattattgccagtgaacagatggcagcagcgcaaggactgacaccgcgggcgcgtatcgtagccatggcaaccgccggggtggaaccgcgcctgatggggcttggtccggtgcctgcaactcgccgggtgctggaacgcgcagggctgagtattcacgatatggacgtgattgaactgaacgaagcgttcgcggcccaggcgttgggtgtactacgcgaattggggctgcctgatgatgccccacatgttaaccccaacggaggcgctatcgccttaggccatccgttgggaatgagtggtgcccgcctggcactggctgccagccatgagctgcatcggcgtaacggtcgttacgcattgtgcaccatgtgcatcggtgtcggtcagggcatcgccatgattctggagcgtgtttgagcatatcaacctgcgagtaccctacaatgataaccaatacaaagcttgacccgattgaaaccgcgtctgttgatgagttacaggcgttgcaaacacagcgtctgaaatggacgctcaaacacgcgtatgaaaatgtgccgatgtatcggcgcaaattcgacgcagcaggcgtacatcctgatgatttcagggaactttcagacctgcgtaaatttccctgtaccaccaaacaggatctgcgcgacaactatccctttgacacctttgccgtgccaatggaacaagtggtgcgcattcatgcttcttcgggaaccacaggtaaaccgacagttgtcggctatacgcaaaacgatattgataactgggccaatattgtagcgcgttctttgcgtgcggcagggggctcgcccaaagacaaaattcatgttgcctatggttacggcctgtttactggtgggctgggtgcgcactatggtgccgaacgtctgggcgctacggtgatcccgatgtctggcgggcagacggaaaaacaagcgcaactgatccgtgattttcaaccagatatgatcatggttacgccatcttattgccttaacctgattgaagagctggagcggcagttgggcggtgatgccagcggttgctcgctgcgggttggagtatttggtgctgagccgtggacacaggccatgcgtaaagagattgagcgtcgcctggggatcaccgcactggatatttatggcctgtcagaagtgatggggccgggggtggcgatggagtgtctggaaactaccgacggcccaaccatttgggaagatcatttctatcctgaaattgttaatcctcatgacggcacaccgcttgccgatggtgaacatggcgaactgttattcaccacgctgaccaaagaagcattgccggtcattcgttaccgcacgcgtgatttaacccgactgttaccaggaacggcgcggactatgcgccgcatggatcgcatcagcggacgcagcgatgacatgttgattattcgcggtgtaaatgtctttccgtcacaactggaagaagagattgtcaaattcgaacatttatcgccgcattaccaactggaggtgaaccgccgggggcatcttgattcactttctgtgaaagtggagttgaaagaaagtagcctgacattgacgcatgagcagcgttgccaggtatgccaccagctgcgccatcggattaagtcgatggtggggatctctaccgatgtgatgatcgttaactgtggcagtatcccgcgttcagaaggcaaggcgtgtcgggtgtttgatctgcgcaatattgttggtgcctgacgtatcgtctggccctggtggggtaaagcgccagggccagaagtcgatacgacctgtgctatgattcataaatcacaacaataacaacagactgaagcgaatgagtaaacttgatacttttatccaacatgctgtaaacgctgttccggtcagtggcacatctttgatctcctctctgtatggtgattcgctttcccatcgtggtggtgaaatctggttgggtagtctggctgctttgctggaagggctgggatttggtgagcgtttcgtgcgcaccgctttgtttcgtcttaataaagaaggctggctggatgtttcccgcatcgggcgacgcagtttctatagcctcagtgataaaggcttgcgcctgacgcgacgggcagaaagtaaaatttatcgcgcagagcaacctgcatgggatggtaaatggctcctgttgctctcggaaggtttagataaatcaacgctggctgatgtcaaaaagcagttgatctggcaaggttttggcgcactggcacccagcctgatggcatcgccgtcgcaaaaactggccgatgtacagacacttttgcatgaagcgggtgtggcggataacgtgatttgttttgaagcgcaaataccactggcgctttctcgcgcagcactgcgtgccagagtagaagagtgctggcatttaactgaacaaaatgccatgtacgaaacctttattcagtcattccgcccgctggtgccgcttttaaaagaggcggcagacgagttaaccccggagcgggcatttcatattcagcttttactgatccatttttatcgccgtgtcgtccttaaagacccattgttgccggaggagttgcttccggcacactgggcagggcatacggcgcgtcagctgtgtatcaacatttatcagcgcgtagcgcctgctgctttagcgttcgttagtgaaaaaggtgaaacctcggtcggtgaactgcctgcgccgggaagcctgtattttcaacgttttggcggcttgaatattgaacaggaggcgttatgccaatttatcagatagacggtctgactccggttgtgccagaagagagttttgtccatccgacagcggtattgatcggcgatgttattctcggcaagggcgtttacgttgggccaaatgccagcctgcgtggcgattttggtcgtatcgtggtgaaagatggcgcgaacattcaggataattgcgttatgcacggttttcccgagcaggatactgttgtaggagaagatggacatattggtcatagcgctatccttcacggctgcattatccgccgcaatgcattagtgggaatgaacgcggtagtgatggacggtgcggtgattggcgagaacagcattgttggtgcatccgcatttgtgaaagccaaagcagaaatgccagctaattacctgattgtcggcagcccggcgaaagcgattcgtgaactcagtgagcaggagttggcatggaaaaagcagggtacgcatgagtaccaggtgctggtgacacgctgtaagcagacgttacatcaagtcgagccattgcgggaaattgaacctggcaggaaacgcctggtatttgatgagaatctgcgaccgaaacagtaacagatgtaaaattattttgtccctttaattataaagcagagttatgtttaagctctgctttatttatttgagtattaattcataccgttttttcatcatataattatttataatgagaatgtggttttaatttgtaatttatattatatacacaatttatatatttcatggtctttttttattcacctgaattataattgtgaattataggaaagtatgtttgattagataataatctactggcaatattggatgtcttctatgttttaaataactaattggtcgggttagtgcatccggctttctttatattcgccagaaggatttattatgcaaaggaaaactctattgtcggcctgtattgcattagctctgagtggtcagggttgggcggcagatatcacagaggtagaaaccaccacaggtgaaaagaaaaataccaatgtgacttgtccggcagacccaggaaaactcagtccggaagagcttaaacgcttaccctctgaatgctctcctttagtcgaacaaaacctgatgccatggctttccacaggcgctgctgcgttaatcacggccttagccgtagtggaactaaacgacgatgatgatcatcatcatcgcaacaattctccactcccaccgacaccccctgatgatgaatcagacgacactccagttcccccaactcctggcggagatgagataataccggacgatccggatgatacgcctacacctcccaaaccggtttcgtttaataatgacgttattctcgataaaacagaaaaaacgttaactattcgcgattcagtttttacttataccgagaatgctgacgggactatatctctgcaagatagcaatggtcgtaaggcaacgattaatctttggcagattgatgaagcgaataacactgttgcccttgaaggggtgagcgcagatggcgcaacgaagtggcaatataatcacaacggtgagcttgttattacgggtgataatgccacagtaaacaacaatggcaaaaccaccgttgacggtaaagattccaccggtacggaaatcaacggtaataacgggaaagtgattcaggacggcgatctggatgtcagcggcggcggtcacggtattgatatcaccggtgacagcgcgacggtggataacaagggcaccatgaccgtcaccgatccggagtccatgggtatccagatcgacggtgacaaggccatcgtcaataacgaaggcgagagcaccatcaccaacggtggcaccggcacccagattaatggtgatgacgccacggcaaacaacaacggcaaaaccaccgttgacggcaaggattccaccggtacggaaatcaacggtaataacggaaaagttattcaggacggcgatctggatgtcagcggcggcggtcacggtattgatatcaccggcgacagcgcaacggtggataacaagggcaccatgaccgtcaccgatccggagtccatcggtatccaggttgacggcgaccaggcggttgttaacaacgaaggcgagagcgccatcaccaacggtggcaccggcacgcagattaacggtgatgacgccacggcaaacaacaacggcaaaaccaccgttgacggcaaggattccaccggtacggaaattgctggcaataacgggaaggtgattcaggacggcgatctggatgtcagcggcggcggtcacggtattgatatcaccggcgacagcgcaacggtggataacaagggcaccatgaccgtcaccgatccggagtccatcggtatccagattgacggcgaccaggccatcgtcaataacgaaggcgagagcactatcaccaatggcggcaccggcactcagatcaacggtaacgacgccaccgcgaataacagtggaaaaaccactgttgatggaaaagattccacgggtaccaaaatcgcgggcaatatcggcattgtaaatctggatggtagcctgactgttacaggcggtgcgcatggtgttgagaacattggtgacaacggcacggttaacaacaaaggagatattgttgtttccgatactggatcgattggcgtgctcatcaacggtgagggggcaacagtatccaatacgggtgatgttaacgttagcaatgaagcgacagggttcagcatcacaaccaacagtgggaaggtttcgctggcaggcagtatgcaggttggcgatttctcgaccggggtagatcttaatggcaacaataacagcgtgacgctggcggcaaaagatctaaaagtggtcgggcagaaagcgacgggcataaacgtttctggcgatgcgaatacagtgaatatcactggtaacgttctggttgataaggataaaaccgcagacaatgcggcggaatatttcttcgatccatccgtgggtatcaacgtttacggcagtgataataacgtgacgctggatggaaagttaactgttgtatcagacagtgaggttacttctcgtcagagtaatttatttgatggcagcgcagagaaaacgtcaggtctggttgtgattggcgatggcaataccgttaatatgaatggtggacttgaactgattggagagaaaaacgcgcttgcagatgggtcgcaggttacttccttgcgcacaggatatagttataccagcgttattgtcgttagtggtgagtcgtcggtatatctgaatggagatacgacaatcagcggagaattccctctggggtttgccggggttattcgggtacaggataaagctttgctggaaattggcagtggcgctacgctaacaatgcaggatattgacagttttgaacatcatgggacaagaaccctggatttgcccctatatttccagacatctgttatcacttaacccattacaagcccgctgccgcagatattcccgtggcgagcgataacccagcgcactatgcggatgccattcgttataatgctcgaacgcctctgcaaggttctttgctgccgttaacccgtctggtttgggcatgatactgatgtagtcacgctttatcgttttcacgaagctctctgctattccgttactctccggactccgcaccgccgtgttcttcggttcaagtcccaacatccgggcgaactggcgtgtttcattagcccggtagcatgaaccattatccgtcagccactccactggagacgacggaagatcgttgccgaagcggcgttccaccgctcccagcatgacgtcctgtactgtttcactgttgaagccgccggtagtgaccgcccagtgcagtgcctcacgatcacagcagtccagcgcgaacgtgacacgcagtctctctccgttatcacagcagaactcgaacccgtcagagcaccatcgctgattgctttctttcacggccactctgcctgtatgtgcccgtttcgatggcggtacagcaggttttcgctcaagcaacagcgcattctggcgcatgatccggtaaacacgtttggcattgatcgcaggcataccatcaagttctgcctgtctgcgaagcagcgcccatacccgacgataaccatacgttggcagctctccgataacatggtgtatacggagaagcacatccgtatcatcagtgtgacgactgcggcggccatccatccagtcatcggttcgtctgagaatgacgtgcaactgcgcacgcgacacccggagacaacggctgactaagcttactccccatccccgggcaataagggcgcgtgcgctatccacttttttgcccgtccatattcaacggcttctttgaggagttcattttccatcgttttcttgccgagcaggcgctggagttctttaatctgcttcatggcggcagcaagttcagaggcaggaacaacctgttctccggcggcgacagcagtaagacttccttcctggtattgcttacgccagagaaataactggctggctgctacaccatgttgccgggcaacgagggagaccgtcatccccggttcaaagctctgctgaacaattgcgatcttttcctgtgtggtacgccgtctgcgtttctccggccctaagacatcaatcatctgttctccaatgactagtctaaaaactagtattaagactatcacttatttaagtgatattggttgtctggagattcagggggccagtctaaaccccagaacttacttatgctgattccggtgcgaaaattgttaataaaggtacttgtagattcaattggtcaacgcaacagttatgtgaaaacatggggttgcggaggttttttgaatgagacgaacatttacagcagaggaaaaagcctctgtttttgaactatggaagaacggaacaggcttcagtgaaatagcgaatatcctgggttcaaaacccggaacgatcttcactatgttaagggatactggcggcataaaaccccatgagcgtaagcgggctgtagctcacctgacactgtctgagcgcgaggagatacgagctggtttgtcagccaaaatgagcattcgtgcgatagctactgcgctgaatcgcagtccttcgacgatctcacgtgaagttcagcgtaatcggggcagacgctattacaaagctgttgatgctaataaccgagccaacagaatggcgaaaaggccaaaaccgtgcttactggatcaaaatttaccattgcgaaagcttgttctggaaaagctggagatgaaatggtctccagagcaaatatcaggatggttaaggcgaacaaaaccacgtcaaaaaacgctgcgaatatcacctgagacaatttataaaacgctgtactttcgtagccgtgaagcgctacaccacctgaatatacagcatctgcgacggtcgcatagccttcgccatggcaggcgtcatacccgcaaaggcgaaagaggtacgattaacatagtgaacggaacaccaattcacgaacgttcccgaaatatcgataacagacgctctctggggcattgggagggcgatttagtctcaggtacaaaaaactctcatatagccacacttgtagaccgaaaatcacgttatacgatcatcgttagactcaggggcaaagattctgtctcagtaaatcaggctcttaccgacaaattcctgagtttaccgtcagaactcagaaaatcactgacatgggacagaggaatggaactggccagacatctagaatttactgtcagcaccggcgttaaagtttacttctgcgatcctcagagtccttggcagcggggaacaaatgagaacacaaatgggctaattcggcagtactttcctaaaaagacatgtcttgcccaatatactcaacatgaactagatctggttgctgctcagctaaacaacagaccgagaaagacactgaagttcaaaacaccgaaagagataattgaaaggggtgttgcattgacagattgaatctacactgttgaaattcagaatttaggttttgcttttgttactggtgaaaatacaacaggtataaatagtggcacgatctcgttattacaaaatggtaaagatccggcaccgtctcccattgttttactggctactaacggagggagcgccactaatgcaggtacgatcacaggtaaagtgacggaacaacatagcgtatttaacaagtattcaacgggcacatcgaattcatttatttttaataacgatgtcagtagcataacagggttagtcgctcaatcgaatagcacaattatcaatactgacagcggcatcattgatttgtatggtcgtggtagtgtcggcatgcttgctatagcagattcaacagcagaaaatcagggtaaaattacactggattctatgtgggtagatgcaaatgacactaccgcaatgcgagatatagctagcaacagcgccattgacttcggtacaggtgtgggagttggtactgatagttatagtggtgcagggaaaaatgcaacagcaattaaccaattgggcggtgttataactatttataacgccggcgcaggtatggcggcctatggcgccagcaatacagttattaaccaggggacgattaacctcgaaaaaaatggtaattatgacgatagtctggcagcaaatactctggtagggatggctgtttatgagcatggtactgctatcaacgaccagacgggtgttatcaatatcaatgttggtactggtcaggcgttttataacgatggcacaggaacaattgttaactatggtacaatctgcactttcggcgtgtgccaatcggggaatgagtacaataatacagatgatttcacctcactgatctataccggtggcgatacgattacacgaagcggagaaactgtaacgctaaataaatctgctgctgtgactgataagctggctgggaatgttgttaatagcggaacgctttccggtgatcaaattacggtatcaagcggtcttctggaaaataccagcggtggcatcatcaataacttagtaaaacttgacaagggtgccgtcattaaaaatgccggggtgatgacgaataacgtcgatgttagcggtggaatcctcaataatgccggagaaatgactgcgcaaattaccatgaatgctggtgctgatagttcgttagtgaacaacaccggaaccatcaataaaatcgtgcagaacgcgggggtattcaataatagtggcagtgtaacagggcggatgatgtcggctggcggggtctttaataatcaaactgacggggcgattatgagaggtgctgcgctgacaggtactgcagtggcaaataacgaaggaacctggaacctcggaagtagtagtgagggtaacaacaccgggatgctggaagttaataataattcagctttcaataaccgcggcgagtttattcttgataacgacaagaatgctgtgcacatcaaccagtccggtacgctttataataccggtcacatgaacatcagtaattcttcccacaacggagccgttaatatgtggggcggaaatggtcgttttatcaatgacggaacgattgatgtttctgcgaagtcactggtagtcagcgctaataatgccggcgatcagaatgccttcttctggaaccaggataacggggtcatcaacttcgatcacgacagcgccagtgccgtgaaagtcacccacagcaactttattgcccagaatgacggcatcatgaacatcagcggcaccggtgctgtggctatggaaggtgataagaacgcgcagctggttaacaatggcaccatcaacctcggtaccgcaggcactactgacacgggtatgatcggtatgcaactcgatgccaacgccacggcggatgcggtaatcgaaaacaacggcaccatcaatatcttcgccaatgactcgtttgcatttagcgtactgggtacagtaggtcatgtggttaacaacggcacggtggtgattgccgatggggttacgggttctggactgatcaagcagggcgacagcatcaatgttgaaggtatgaacggtaacaacggtaatagcagcgaagtgcattatggcgactatacgttgccggatgtgccgaagcccaatacggttagtgtaacgtcgggaagtgatgaggctggtggcagcatgaacaacctcaacggctatgtcgtcggtaccaacgttaacggcagcgccgggaagctgaaggttaacaatgccagcatgaacggcgtggagattaacacgggctttaccgctggtacggcagacaccactgtgagttttgataacgtagtggaaggtagcaacctgaccgacgctgacgccatcacctcaacgtccgtggtatggactgccaaaggcagcaccgatgccagcggtaacgttgacgtcaccatgagcaaaaatgcctacaccgatgtggcaacagatgcctcggtgaatgacatcgcgaaagcactggatgcgggttacaccaacaacgaactgtttaccagcctgaacgtcggcacgactgctgaactgaacagtgctctgaaacaggtcagcggtagccaggcgaccacggtattccgcgaagcgcgcgtgttaagcaaccgctttagtatgctggcagatgccgcgccgaaagtgggtaacggtctggcgttcaacgttgtcgcgaaaggcgatccgcgtgccgagttaggtaataataccgaatacgacatgctggcattgcgtaaaactatcgacctgagcgaaagccagacgatgagtctggagtacggtatcgctcgtctcgatggtgatggtgcgcagaaagcgggtgataatggcgttacaggcggttatagccagttttttggcctgaaacatcagatgtcgttcga
